United States Patent Application Publication US 2007/0042381 A1 - sequence listing, part 94

SEQ ID NO: 4193255 - RNA, 68 nt, Human
cugucacccaggcuggugcgcaguggcaugaucacagcucacugcaaccucagccuccugggcucaag

SEQ ID NO: 4193256 - RNA, 55 nt, Human
cugucaccuguucacugcagcaccucguuaggugaguagcaggccagggugacag

SEQ ID NO: 4193257 - RNA, 65 nt, Human
cugucagaggcucucuguugccaccagcugccuggccaugacaucgcagagagaccaucuugcag

SEQ ID NO: 4193258 - RNA, 77 nt, Human
cugucauagccaagaggagccuaaagcgacaugacuacuaaauguagugugguaucuucuauggaauccuggaacag

SEQ ID NO: 4193259 - RNA, 84 nt, Human
cugucaugacuauauaucucagagaaauuugaaugcaauuaccagagugaauguaaaaaguuucugugauauauacaugggcag

SEQ ID NO: 4193260 - RNA, 69 nt, Human
cugucauucugagauaugggcugaaggaacauccucucccugaggcuuugcuaguguuucaguagacag

SEQ ID NO: 4193261 - RNA, 57 nt, Human
cugucauugacagaacucaaauugugauaggcaaauuggcuucaaugucagagacag

SEQ ID NO: 4193262 - RNA, 55 nt, Human
cugucauugagccugucagggcccaaccaacauggccccaugugcucaggggcag

SEQ ID NO: 4193263 - RNA, 60 nt, Human
cugucauuggcagggagugugugcugacacugcccagcccucacugccuggcgaagauag

SEQ ID NO: 4193264 - RNA, 80 nt, Human
cuguccaacauguuauggcuaaauuucaauauuaguaauauuauuaguaaauaauuauuagauauaguaugucuggagag

SEQ ID NO: 4193265 - RNA, 63 nt, Human
cuguccagaauaggcaaauccauagagaaagaaaguagaguagugguugccuagggccggcgg

SEQ ID NO: 4193266 - RNA, 80 nt, Human
cuguccagaugccuguggggcacuacagaguuuugaggaaauagagucucagacuggagccccaaggaccuugaggacag

SEQ ID NO: 4193267 - RNA, 61 nt, Human
cuguccagcgacuaggggauggagccaaugccgugcgagcaaaucccuugucgcuaggcgg

SEQ ID NO: 4193268 - RNA, 55 nt, Human
cuguccagucuuuagcaagcuggaaccuuuugguuugcuccugaguacuggcuag

SEQ ID NO: 4193269 - RNA, 61 nt, Human
cuguccaguuguauguccagugucucuguaauuaagaugaugaggaccuacagguggccag

SEQ ID NO: 4193270 - RNA, 83 nt, Human
cuguccaucuuucugucuguuaucucaccaguccccacuacugggagaccccaauguggcagauuagaaggagcacuggacgg

SEQ ID NO: 4193271 - RNA, 56 nt, Human
cugucccagccccguacucuaacaauguugaaguuagggucuccggcgcggcacag

SEQ ID NO: 4193272 - RNA, 63 nt, Human
cugucccauacuaucugggugauguucuaacucucaacugccucaucuauaaaauggagacag

SEQ ID NO: 4193273 - RNA, 61 nt, Human
cugucccuagaaaugaaagcauacguccacacaaagacuuguaugugaauguuucuagcag

SEQ ID NO: 4193274 - RNA, 129 nt, Human
cuguccgaguucaucagccgcuacaaguccuccggcuucaucgaccugcuccacgacaagugguacaagauggugccuugcggcaagcgggucuuugcgguuacagagguggggcagggccugggacag

SEQ ID NO: 4193275 - RNA, 66 nt, Human
cuguccgucugucucuccuucucaaucccuucaagcucagggaagaaggguccuuggcagcgacag

SEQ ID NO: 4193276 - RNA, 106 nt, Human
cuguccucacuuucaguugucagcagugcuucagugugagaugaaauaaauugccaagcccuuucaucuucuauaaucagcucugcacagcugaguacacccacag

SEQ ID NO: 4193277 - RNA, 84 nt, Human
cuguccucuuggcagcagaguguggugcucaggaggccaccuggcaccugucagcucugccuuuggcugccgucugagagacag

SEQ ID NO: 4193278 - RNA, 74 nt, Human
gaaggcugcagggaggggagagaacaggaggaucccgggccagggugacuucagugacauuccuucccuccuuc

SEQ ID NO: 4193279 - RNA, 56 nt, Human
gaaggcuggcaaagauccaacacggcagcauuucuugcuucgguuugccaggcuuc

SEQ ID NO: 4193280 - RNA, 73 nt, Human
gaagggaaaggaaugagcuucuguuaggcacccacgacacacuggguccuuaaauccaucauuucuaauccuc

SEQ ID NO: 4193281 - RNA, 66 nt, Human
gaagggaaauggccaggcagagacuucuugugaacaaaagcugucccuucuacucuguuuuccuuc

SEQ ID NO: 4193282 - RNA, 55 nt, Human
gaagggaacugucuggcaaagcauaaguggaugcauccagagcucaguccccuuu

SEQ ID NO: 4193283 - RNA, 71 nt, Human
gaagggaaggaagucauuagugcagacugagcuguggaguuggguucuugcaggauuuccuuccagccuuu

SEQ ID NO: 4193284 - RNA, 69 nt, Human
gaagggacuggggacuggggagggaagcaugggguuuuagaguugcccaccuuagucuucagacacuuu

SEQ ID NO: 4193285 - RNA, 59 nt, Human
gaagggcucgguagcaguccugaggcucauggcgccuagagaaagccaccgagucucuc

SEQ ID NO: 4193286 - RNA, 55 nt, Human
gaagggcugaucucacuuucuuuucuccacuccaggaaugaaagcaaagcccuuu

SEQ ID NO: 4193287 - RNA, 82 nt, Human
gaaggggcauccugcagcuccucugucagagggauuccugccggagcaccuccuggcagagagcaugaggcccggccaauuc

SEQ ID NO: 4193288 - RNA, 77 nt, Human
gaaggggggaaaauuagguccuggaaauugacggaaagcuguuuggcaucuugaaauuaaccaggacucccccuuuu

SEQ ID NO: 4193289 - RNA, 75 nt, Human
gaaggguaacagaaauagaaaugagaguccgacaagagaaaaggacucuguuacugggaucuggggccacccuuc

SEQ ID NO: 4193290 - RNA, 69 nt, Human
gaagggugcaagcuucucugugugcaagugucauugucuagagaguacacaguucugccggcaucuuuc

SEQ ID NO: 4193291 - RNA, 57 nt, Human
gaagggugcuggaaucagaccgaaccguugguuugaaccugagcuucugcaugcuuu

SEQ ID NO: 4193292 - RNA, 85 nt, Human
gaagguagaugcagaagaugcagugucugagaauuuucaagauuguauuucucucauaagcaucaaucacagugcaucuuucuuc

SEQ ID NO: 4193293 - RNA, 95 nt, Human
gaagguauggacuuggcuaaauugaguuauagauggacuauuauuuuacaucaaaucauugucgaauggcaucuguagcuuuuaaguuuacuuuc

SEQ ID NO: 4193294 - RNA, 68 nt, Human
gaaggucaguagggaaggccaacuucaugugcaaagagcaauauguguguauuucuuacuagcuauuc

SEQ ID NO: 4193295 - RNA, 74 nt, Human
gaaggucuuaccaugcugaggaggugggacuugauccuguagucaggggaaaucucucagcgaagcuggccuuc

SEQ ID NO: 4193296 - RNA, 89 nt, Human
gaaggugcauucuguuccauaaguggugcuuuguugcuguguccucacauggcagaaggggcaagguaucucucuggagcucugccuuc

SEQ ID NO: 4193297 - RNA, 65 nt, Human
gaaggugggaggcaggcugcucccauguggugagaacagugggaacagcugggcuucccuccuuc

SEQ ID NO: 4193298 - RNA, 74 nt, Human
gaagguuugaggcaucaggaguauagccagaaccuugagguucuuucuuuggaguuuguugccuguaaauauuc

SEQ ID NO: 4193299 - RNA, 85 nt, Human
gaaguaaguaaauaauagaguauuuugauuauccuggagguuuuucuccagaaaaaguaauuuauuugaugaauuugguuacuuc

SEQ ID NO: 4193300 - RNA, 82 nt, Human
gaaguagauagcagagacauucuccccauuggacagaugcaauaacuaagguucaaacagaugacucugcucuucccccuuc

SEQ ID NO: 4193301 - RNA, 74 nt, Human
gaaguaggcuaggcugaagguuuuggagucuacaaauccugaucucugaguucaaaucccagcucuaccacuuc

SEQ ID NO: 4193302 - RNA, 84 nt, Human
gaaguagguagaaugcauuuuggauggcauauuuucuucuugauuguuucuuuucucuuccagaaugcauucucuuuugacuuu

SEQ ID NO: 4193303 - RNA, 91 nt, Human
gaagucaagacacuauuucuccuccacuguaggauccuguucacugaggagccacagugcaagagagaaaaguuucuuccaaccugacuuc

SEQ ID NO: 4193304 - RNA, 103 nt, Human
gaagucaagauucuggcacuagcaucaaggaauaaaaagaggcaugaagcuucagcuucuuucuguuucucugaagacaccuaaugucuugauucugcucuuc

SEQ ID NO: 4193305 - RNA, 69 nt, Human
gaagucagaauuuuuguuacccuugaggguggagguaguacuucgagggcgcugauaguguucuguguc

SEQ ID NO: 4193306 - RNA, 67 nt, Human
gaagucauauagggcccuggacuuuuggccucugucuucugagauucuuggaacccuaugugauuuc

SEQ ID NO: 4193307 - RNA, 58 nt, Human
gaagucauuuuaccaagauuugucuuuaaaauagcugacaggcuuuagaaaaugacuc

SEQ ID NO: 4193308 - RNA, 100 nt, Human
gaaguccagggagaccuagcacagcuucuccuugauaucgcgcaugauuucccgcugggcuguguuggugaagcuguagccucucuccuugaggaucuuc

SEQ ID NO: 4193309 - RNA, 67 nt, Human
gaaguccaugcuuagaaagugauugauacauguugguucagguaacagaauuuucaagcuugguuuc

SEQ ID NO: 4193310 - RNA, 55 nt, Human
gaaguccgggaggaucauguucauggcugcagugaacaggucccccacgggcuuu

SEQ ID NO: 4193311 - RNA, 64 nt, Human
gaagucucgguuggcuaaaaucagaguaucugacaaguucuggacuugccuugcugaugauuuc

SEQ ID NO: 4193312 - RNA, 56 nt, Human
gaagucugagugggggccaggcucucgggggccugggucaucuccacucaggcauc

SEQ ID NO: 4193313 - RNA, 55 nt, Human
gaagucuuaccuccagguuucuggcaauaugcccuuauuuggaaauaaggucuuc

SEQ ID NO: 4193314 - RNA, 57 nt, Human
gaagucuucauucucucugagaagaagguaagaccaccugagagugaggaaggcuuc

SEQ ID NO: 4193315 - RNA, 72 nt, Human
gaagugagaagcauuuugagccucuaagugaagaccuuacuucagcuucaagguucaaggaugcucuaguuc

SEQ ID NO: 4193316 - RNA, 92 nt, Human
gaagugauccuuaaagcugcagugaauucgcuaacuggaugacauaccagaguggugagauuucugccugaagaagugaaggguccaacguc

SEQ ID NO: 4193317 - RNA, 62 nt, Human
gaagugcauucuccuauuacauuaauaauaauuuuacaguaugguggcaggaaaugcacuuu

SEQ ID NO: 4193318 - RNA, 84 nt, Human
gaagugcuuauuugucaggaaaucuauuucuuaccaaaggauuauuguauguaaagguacugaaauagcacucugaugcauuuu

SEQ ID NO: 4193319 - RNA, 61 nt, Human
gaaguggagccaggagccugggagucaccugcugccucccuguuuccugcuccaaccaguc

SEQ ID NO: 4193320 - RNA, 59 nt, Human
gaaguggugcuaugccaguucuaggcauagcccuuaacugagcuggcagcuuccacuuc

SEQ ID NO: 4193321 - RNA, 130 nt, Human
gaagugguguuuuuuguuuuguguuuaagauuacagcuugcucaguuugcacacaugccuacagcugggcuugguuuuugcaggugcagcgauacugugagaagagcaugaucagcagaaagguaacugc

SEQ ID NO: 4193322 - RNA, 67 nt, Human
gaagugugaaggugauguggagaaugcacaaaaagcuugcucugguuguuaccuuccuagacacuuu

SEQ ID NO: 4193323 - RNA, 73 nt, Human
gaaguguuggacagguggguaccuuuauggaggcucugagggagaaucugugccaugcccgucuaccagcuuc

SEQ ID NO: 4193324 - RNA, 73 nt, Human
gaaguuacacaucuagcacacacuggcagcuuauguucuauuucugcuggacagugcugcuugagaugucuuc

SEQ ID NO: 4193325 - RNA, 78 nt, Human
gaaguuauaugacuuauccaaggcuauaucucaauacuauuggaaucaaaaguagauguggcugagucuucugaauuc

SEQ ID NO: 4193326 - RNA, 66 nt, Human
gaaguuauugcaauucuggcaccuuucuggacuuccuuccagagcagugaggaguuguguaaccuc

SEQ ID NO: 4193327 - RNA, 57 nt, Human
gaaguuccucguaggagucucuaacuaacauguucaagaucuuaaugccaggaacuc

SEQ ID NO: 4193328 - RNA, 77 nt, Human
gaaguucuggccuaauucuuauaauuaaaaguauucuguaauguuagaaaagaacuuaagaaauuaggcuagacuuu

SEQ ID NO: 4193329 - RNA, 64 nt, Human
gaaguucugguguaugugauaaauuaaaaacagcuugucacuuuauagcuacaccuuggauuuc

SEQ ID NO: 4193330 - RNA, 83 nt, Human
gaaguugccuacauuguuggauauugaguaaauaaaaguggcaacauuuucuagcugacaaaaauguuuuacaaagcaacuuu

SEQ ID NO: 4193331 - RNA, 75 nt, Human
gaaguugcugcugaggaguaagcaggggggacucugggccccucaucucauccugcaccugagcagccugacuuu

SEQ ID NO: 4193332 - RNA, 76 nt, Human
gaaguuggacaaauccagaucccagucguagcugugucacugacuagaaugugaucuggguaacauuuuuaacuuc

SEQ ID NO: 4193333 - RNA, 108 nt, Human
gaaguuguuuacauguuugacaaguuugacagaaguuucuaauguuuaaguucucauacauugauaauggaauguuaaacuguaauuucaaaaauaugucuuuauuuc

SEQ ID NO: 4193334 - RNA, 90 nt, Human
gaaguuucgcucuuguugcccagguuggagugcaauggugugaucucagcucacugcaauccccgccucaacaggagagcaggaaucuuc

SEQ ID NO: 4193335 - RNA, 89 nt, Human
gaaguuuggaaugcuuuuuuagacacacuuuguauauuuggaaacuguauuucauaauaugacuuguuugaaauggauagcuagauuuc

SEQ ID NO: 4193336 - RNA, 87 nt, Human
gaauaaaaaggcucuaaauauguaugacuucuaucaauuauccaugcuugaagaaagucauauauaaugagaguauaggaaauguuu

SEQ ID NO: 4193337 - RNA, 59 nt, Human
gaauaaacaaguaguagagcugguguuugaauccagguuuaguucuaccacuugcauuc

SEQ ID NO: 4193338 - RNA, 93 nt, Human
gaauaacuucuggauguuucaaaugugcuuccaaaggauaaaaauuuuccaucccuuaaagaaugaacauuugaggauguuaagaaugcauuc

SEQ ID NO: 4193339 - RNA, 64 nt, Human
gaauaauaggguuauagcaguguuaggcucaauauuguagcuauucugagaauccuacuuauuu

SEQ ID NO: 4193340 - RNA, 70 nt, Human
gaauaaugcaguaagcaauggugaaugcuuggaaugauaacuguaaucaugcaccuguucacugcaguuc

SEQ ID NO: 4193341 - RNA, 78 nt, Human
cugucguucgccgucagucauuaugggaguuaauccugugcuaggaaaugagacggaugacucuacaggugaauucag

SEQ ID NO: 4193342 - RNA, 60 nt, Human
cugucuagaagcuuugugaaggcagaagcgaucucuccuuugccacccagagccugacag

SEQ ID NO: 4193343 - RNA, 79 nt, Human
cugucucacaguucuggaggauagaagucugagauuaagguguuggcagaguugguuccuccugagggcugugagggag

SEQ ID NO: 4193344 - RNA, 72 nt, Human
cugucucaggaugagaagauuggaaucuucauuugcaaagagaagaaauaagacuucucuguccuuagccgg

SEQ ID NO: 4193345 - RNA, 83 nt, Human
cugucucugacccccacuuugcagcugaggacauuucagguucaaagacaugaacugacuugcucaaggucacauagagagag

SEQ ID NO: 4193346 - RNA, 124 nt, Human
cugucucugacuuugucuuuucuuccucuugacauguucuccugggcauuccugcugcuuacugcaaugucaaucucagagaacacagagcugcgagaguugugaaaucuuagagucagaauag

SEQ ID NO: 4193347 - RNA, 128 nt, Human
cugucucugucuaggagaacagcuauggugcagaauggaagcaucaacauauguguuaagcacauguguauuacccuuucauuccugucucacguagaagguaaaucacuucuucuagacggcaacag

SEQ ID NO: 4193348 - RNA, 64 nt, Human
cugucucugucucuguucgucucccucucuggcaccuguccaggaaugacugcagauggggcag

SEQ ID NO: 4193349 - RNA, 58 nt, Human
cugucugcaggauaguacccucaugaauuucaauguguggggaagucacugcagucag

SEQ ID NO: 4193350 - RNA, 56 nt, Human
cugucugcauuggaagucuggcugggaaacaaguccugagacuuugaguuagaggg

SEQ ID NO: 4193351 - RNA, 61 nt, Human
cugucuggcuuuauauuugcuauuccacaggggugucaaaagcaaucugagggccggcuag

SEQ ID NO: 4193352 - RNA, 79 nt, Human
cugucuuaagaaaaugagcuucccacuacauacauguacuuaaaugcacugagguuguaguaggaauuccuugagagag

SEQ ID NO: 4193353 - RNA, 66 nt, Human
cuuuauaaaggcaguaaaaucuaccuugcagaguuguuguaaggauuagaauuacuguauaugaag

SEQ ID NO: 4193354 - RNA, 66 nt, Human
gacauaaggggagccagccauccagaaccugggcagagacccauguccucugacuugccuugcguc

SEQ ID NO: 4193355 - RNA, 66 nt, Human
gacauaccagaccagcugcguugcuuuccauugacaggaagcaaaucagcugcucaggaaaagguc

SEQ ID NO: 4193356 - RNA, 84 nt, Human
gacauauuuuuacagcugagagacaaugagucauugcaaccuuucugcaugaguuucaaguuuucucaaaaucaaaaaucuguu

SEQ ID NO: 4193357 - RNA, 73 nt, Human
gacaucaccacagcuuugcaccaggugugcggccaccacuagcugagcuuuugccccugcagcuggguggguc

SEQ ID NO: 4193358 - RNA, 71 nt, Human
gacaucaggggaccagcccugcccugcccaugaaccacuuccaaccagcaagcagacugggccccuguguu

SEQ ID NO: 4193359 - RNA, 58 nt, Human
gacaucauagggugggaggaaagguuggguuuucucacuuucuccugucuuaaauguu

SEQ ID NO: 4193360 - RNA, 59 nt, Human
gacaucuacaugcuugccacugcuaggacauuagucagagugaguggguaagugaaguc

SEQ ID NO: 4193361 - RNA, 70 nt, Human
gacaucucuuuugucuuuuuacaccgugcucuuuaacaaagaacauaaacagaaggacagaagaauuguc

SEQ ID NO: 4193362 - RNA, 90 nt, Human
gacaucuuaaugauaauauagaauguauuauaguacagauuccaaaauccuaggauacucuguugugaaacauuguauuuaauagauguu

SEQ ID NO: 4193363 - RNA, 88 nt, Human
gacaucuuggagcucugugggggaaauccuggguugcaaaaacaaauaagggugcaguccuagcccccaggaagcucacuugggaguc

SEQ ID NO: 4193364 - RNA, 85 nt, Human
gacaugagaguguggaacugaauugaucuaacccaguaacugaauuacaaauggguuaagccucauucauagcagucuacguguc

SEQ ID NO: 4193365 - RNA, 63 nt, Human
gacaugauggaaaaaaaugcucugcuguuuucuuguugcuuuucaugguuuuagcaucauguu

SEQ ID NO: 4193366 - RNA, 62 nt, Human
gacaugcauagcuuuggagcuaggaugccagccuaugccuuccugugccagucuauguguuc

SEQ ID NO: 4193367 - RNA, 64 nt, Human
gacaugcgagaccugaaagacccagagauacagauuccuuuucugggccacuugucugcacuuc

SEQ ID NO: 4193368 - RNA, 57 nt, Human
gacauggucccuguugucucugcacuuacagccuggaaacuagcagcaaccaugauc

SEQ ID NO: 4193369 - RNA, 100 nt, Human
gacauguuuuauuauggcagaaucugaaaguauggagcaguaugacguauuaaauaucugcagcaccauauguuuagaucucuucaucuugauaaauguc

SEQ ID NO: 4193370 - RNA, 85 nt, Human
gacauuauguuucagauacagaucaaauuagggcugguuuguguaaauguuuugcuuuauuugcuguaaucugaagcacaauuuu

SEQ ID NO: 4193371 - RNA, 66 nt, Human
gacauuauuauuuuuccuacuuuacagaugaggaaacugauccacagagaggaagaauaguuuguc

SEQ ID NO: 4193372 - RNA, 58 nt, Human
gacauucauugaugucuuccucuguaccaggccaguacuaggaggaaaaaaaugaguc

SEQ ID NO: 4193373 - RNA, 67 nt, Human
gacauucugggcuuggcuguuuccauuauuuuacugacaaugaaaaguggucaaguuccaggaaguc

SEQ ID NO: 4193374 - RNA, 66 nt, Human
gacauugaaaauaauguguagagcuuucuaaauaaaauaagacuuuaugaguuuguuuucuguguu

SEQ ID NO: 4193375 - RNA, 79 nt, Human
gacauuuauuaucucacaggucgagcugucuggaaacaggaaguucuaggcuugguuaauucugugugaugaaguuguc

SEQ ID NO: 4193376 - RNA, 87 nt, Human
gacauuuauuuucagacauuaagugaugggaaguaguaguaaggauuugucauguagcauuuuaugucugcaaagugcuuuacgguc

SEQ ID NO: 4193377 - RNA, 72 nt, Human
gacauuuguucacacugcagggcccugaaaagacagacuggggggcugcuggagcuuugcagaagggguguc

SEQ ID NO: 4193378 - RNA, 62 nt, Human
gacauuuugcuggauugcaucuauacagcacuccacuguaaauggcaacuucacaaacuguc

SEQ ID NO: 4193379 - RNA, 64 nt, Human
gacauuuuugaggucauagggaagggauuuauaguuccccagaagucucuaaccucaagagguu

SEQ ID NO: 4193380 - RNA, 74 nt, Human
gaccaaauggugagaugcagcaacagacauggaacacgugagggccagugucucagcugugcuucauugggguu

SEQ ID NO: 4193381 - RNA, 82 nt, Human
gaccaagcaucuggauggaaagcaaggaauauggucagcaaaguucugccaucugaauuuuccuuuucauucagauguuguc

SEQ ID NO: 4193382 - RNA, 116 nt, Human
gaccaauaaauaaacuaauaagcuggggauugccuauuuugaagauuuuugccagugaauacaauagauucacaggcuuuuacagucagucaaacucagcuuauagacuugugguc

SEQ ID NO: 4193383 - RNA, 80 nt, Human
gaccacaaaguaucaacucccacacugugccaauacugugguaaacacuaugacaguggggaucagguauuuuauguguu

SEQ ID NO: 4193384 - RNA, 62 nt, Human
gaccacacuuugacaaccuugaguacuugaguuuucaagccaccuucaagccagaggugguc

SEQ ID NO: 4193385 - RNA, 80 nt, Human
gaccacagauaguauaauuucauucauaugaaauauccagaauagguaaauucauagaaauggaaaguauauuagugguu

SEQ ID NO: 4193386 - RNA, 64 nt, Human
gaccacagccagguaaaggcauggcaggcacuuggccuccaagcucuacguccugugcuuuguc

SEQ ID NO: 4193387 - RNA, 99 nt, Human
gaccacaguguuggguacgugacaugggcugacccagucguggcacaccauuucccuguccacacugaucgguucacuuauggguacuugacgcaaguc

SEQ ID NO: 4193388 - RNA, 66 nt, Human
gaccacucaguacuaauugaacaccugguacaugcccaugcuugaugugagaagaguacugagguc

SEQ ID NO: 4193389 - RNA, 58 nt, Human
gaccacugaugacaugaggagaggcaaagagggaccagaauucaugucagaaaggguc

SEQ ID NO: 4193390 - RNA, 57 nt, Human
gaccagagacccaguggggaguuaccgucugaaccucuccagccacuuccgcugguc

SEQ ID NO: 4193391 - RNA, 76 nt, Human
gaccagaggccagacugccuuuuaugacuuggccuuggaagucauacaagaucacuuuggccauguucaacugguc

SEQ ID NO: 4193392 - RNA, 67 nt, Human
gaccaggacaguggugugaugacagaagacucagucagauauucuucuuguucagacuauucugguc

SEQ ID NO: 4193393 - RNA, 58 nt, Human
gaccaggcccaggugcaagggacauacacaugacgucccugcgcucaggcucuguguc

SEQ ID NO: 4193394 - RNA, 59 nt, Human
gaccaggcuagagugcaguggcacgaucuuggcuugcugcacccucugccuccgggguu

SEQ ID NO: 4193395 - RNA, 71 nt, Human
gaccagggucaggcuagcccagacuucagguacgggcugugaugacgaggagugggcuagucucccggguc

SEQ ID NO: 4193396 - RNA, 57 nt, Human
gaccaggguugagucagcugcgucagugggagccacacggggcuuguggccaugguc

SEQ ID NO: 4193397 - RNA, 67 nt, Human
gaccaguugcuuggaguaugagcuuccuggagggcaccuccagagagguuucuccaugcugaugauc

SEQ ID NO: 4193398 - RNA, 87 nt, Human
gaccauagcaguagggaaaugugggcuguuucuguagcuauucuuguaaagguuacagagcaucucauuucagaauuugcaguguuc

SEQ ID NO: 4193399 - RNA, 75 nt, Human
gaccauccauucaaugagcccaagaacgugaaaguaaaucuuuauucacaaaagcuuuugaauuuggggaugguu

SEQ ID NO: 4193400 - RNA, 59 nt, Human
gaccauggagaggguauuggcugccuugaccagaaauuuaccaggaccuuuccaggguc

SEQ ID NO: 4193401 - RNA, 79 nt, Human
gaccauuugugcugaaauagaggagguggcugucaagaauaggagucggggucucuauuugcaguggucucaacugguc

SEQ ID NO: 4193402 - RNA, 122 nt, Human
gacccacccaaauaaugaauacauguccuagacauagaaaauucauacauuuuuauuaaugcaccauaggaaugcuauuauuucuguguguggauuccuauguucuuauuaauacauacguc

SEQ ID NO: 4193403 - RNA, 59 nt, Human
gacccagccucugaaaugaacgccccucuauuuuguucuccuggagugcuuguuggguc

SEQ ID NO: 4193404 - RNA, 56 nt, Human
gacccaggaagcuacuucugguaacaguugucacauaccaggcaguggacuggguc

SEQ ID NO: 4193405 - RNA, 55 nt, Human
gacccauauaggacccuccaaagacauuacaugucccagggcucucugcuggguu

SEQ ID NO: 4193406 - RNA, 88 nt, Human
gacccaugccagcagcagagcugggcagaggagccaggcaucauccucucucuccccacacccucugcaugcacuuggccucccuguc

SEQ ID NO: 4193407 - RNA, 64 nt, Human
gaccccaacccuagagucugaccagagacaccaacuguugagccucagccucagggcugggcuc

SEQ ID NO: 4193408 - RNA, 67 nt, Human
gaccccagagggcugaggauaugaacagugaucugguuuuguucuguucuuuguccccuugguuguc

SEQ ID NO: 4193409 - RNA, 55 nt, Human
gaccccagucugcacuccuucccccuccgugggggaagcucuguggcuuggaguc

SEQ ID NO: 4193410 - RNA, 82 nt, Human
gaccccgcccgcuugcuugcuugcuugccugccacucaagagaaggugccaggggacgcggagcgacgagaggcgugcaguc

SEQ ID NO: 4193411 - RNA, 75 nt, Human
gaccccuucccucagcugccgccaagcugcucgguccuuccgaggaagcuaaggccgcguugggguaaggcccuc

SEQ ID NO: 4193412 - RNA, 61 nt, Human
gacccuccugucuucuaaccaaaccaaaaauuaauuagugaagaagagagacaggaggguc

SEQ ID NO: 4193413 - RNA, 94 nt, Human
gacccucuacugguaacuugguugcuaaaggauuuuguauuuauuucugucaacguaagauaauuucugauuuagcuaccucccauaugggguu

SEQ ID NO: 4193414 - RNA, 60 nt, Human
gacccugaaagaggaaugaauuagcucuucaagggccugcucaguccucuuucuuugguc

SEQ ID NO: 4193415 - RNA, 58 nt, Human
gacccugaggauucccugcugauccaugucuuccgauggggaggguguccucaguguc

SEQ ID NO: 4193416 - RNA, 80 nt, Human
gacccugauucugugaaaucacccagguuuaagcgcuagcauuuguuaauccagcgggugauugcacaggcuuuggaguu

SEQ ID NO: 4193417 - RNA, 81 nt, Human
gacccugggaucagccaggcccguucccuucuccagccagagaacuggaggcuggagaaggggagaggccuuccccagguc

SEQ ID NO: 4193418 - RNA, 120 nt, Human
gacccugucacccaaaggcugcaggcagugucuggaguggaggugccuugggcugacagcccagccuggcccugucccccacucagugcagccugccccggugcccccaguggcaggguc

SEQ ID NO: 4193419 - RNA, 66 nt, Human
gacccuguggcugccacuugggugaaguuuggaauaaaccucacuugagauguaccacaaacuguc

SEQ ID NO: 4193420 - RNA, 77 nt, Human
gacccuuggugaaauucaaauaagauauguagauuaguuaauagucuuguaucaauguugaguuccuaguuuggguc

SEQ ID NO: 4193421 - RNA, 56 nt, Human
gacccuuucugagugagcaguucaccugcugugugcagccaccuuggagaggcguc

SEQ ID NO: 4193422 - RNA, 65 nt, Human
gaccgagacuggacucugaagauggguggccuggccagucccgaacaguguccaggcauuugguc

SEQ ID NO: 4193423 - RNA, 77 nt, Human
gaccgaugcaguaaacacuagcauucuuggaauugcagguuaucauuuuccaagcugcugcuguugauucuuccuuc

SEQ ID NO: 4193424 - RNA, 58 nt, Human
gaccuacaguuaauuaguuggagauguugaagcugcuuugacaguacucuguaggauc

SEQ ID NO: 4193425 - RNA, 57 nt, Human
gaauagcaucauuaccuuggauguccuggcucugacauccguugugcuguugcucuc

SEQ ID NO: 4193426 - RNA, 71 nt, Human
gaauagcuucuccagguguaagaauccuucagcuuccaaagcuaaggaacucuguaacaccaguguuauuc

SEQ ID NO: 4193427 - RNA, 73 nt, Human
gaauaggccagcaguauauagcuaauucacucauaauuaaggaaguuagccaagauauucugagucauuauuc

SEQ ID NO: 4193428 - RNA, 81 nt, Human
gaauagggaccuuagaauuguauguauguuucuaggcuaauauuugcaagacaugucuaagguuuaaaguuuuuccuauuc

SEQ ID NO: 4193429 - RNA, 129 nt, Human
gaauaggggaggcaacagagcagagaugacuggauggcccagacucagacugguggacuaccagucuaccaugguauccugagugacugcacaggccaaugauuugacugcuaagaggguuuccuguuc

SEQ ID NO: 4193430 - RNA, 85 nt, Human
cuuucagcccuagcagaaggccagggaugccagcucggcugagcacagccaugcauggcacuggacuggggcugggggauggaag

SEQ ID NO: 4193431 - RNA, 74 nt, Human
cuuucagcucugagugagacuagauuuaggaaacuuacguguuccccaccuaaaggcagccacugagcucaagg

SEQ ID NO: 4193432 - RNA, 66 nt, Human
cuuucaggacaggccuuccacaggcugcugacagcacugcagggaugugaggcccguuccugggag

SEQ ID NO: 4193433 - RNA, 83 nt, Human
cuuucaguacaugacuacuuggaauguuuuaaccuuuccuuuaaugagccauuaagauagaacccaguagucuuuguugaagg

SEQ ID NO: 4193434 - RNA, 60 nt, Human
cuuucagugaaaugccugacaguuuuauguguuccuuccuguuuagcauggcagugaaag

SEQ ID NO: 4193435 - RNA, 63 nt, Human
cuuucauccgcagaugagccuccucaaagguugcgagaggcugaugcuggcugaggcuggagg

SEQ ID NO: 4193436 - RNA, 118 nt, Human
cuuucaucgucuucuaaugaccaaacacuuuguucuagagcuauuuagagcauuuuagguuuuccccuaacaucuuuagcagcucgaacuuggaagaagucauuacgaaugaugagag

SEQ ID NO: 4193437 - RNA, 72 nt, Human
cuuucaugacuuuguggcaaaauaauagauuuugguuuugguuuuguuuuguuuugcuaaagggucaucaag

SEQ ID NO: 4193438 - RNA, 58 nt, Human
cuuucaugcacuucuuuagaucuccaauguuaacccaggucugugcaguguuugagag

SEQ ID NO: 4193439 - RNA, 69 nt, Human
cuuucauuguugugagaucaagcaguugcacuucaagugcauucacugauauaauuuccagcaggagag

SEQ ID NO: 4193440 - RNA, 78 nt, Human
cuuuccaaggucuguuggccuucucugacuccucagccccauuugaggaauguuuugagugccgagagccugggagag

SEQ ID NO: 4193441 - RNA, 79 nt, Human
cuuuccacuggcaaugaggccuuuugaagacuggcaauuuccugaucaguugguucacuccuucaugcccagucagaag

SEQ ID NO: 4193442 - RNA, 68 nt, Human
cuuuccaggaacuaagcacauuaucugauaauuguaaauuuuuuugucagugcuuuaguucaggaugg

SEQ ID NO: 4193443 - RNA, 63 nt, Human
cuuuccccaguaacauacaugugaugucagacagucacaucacagcuauguuacuggggaaag

SEQ ID NO: 4193444 - RNA, 78 nt, Human
cuuucccuuaacagugugacaggaaggcggcaacaucuguuuccaugugaguacacugugauacauugaaagggacag

SEQ ID NO: 4193445 - RNA, 60 nt, Human
cuuucccuuaauaaucuucaaaauguccacgugaaggacaggaagauguuuaaugggaag

SEQ ID NO: 4193446 - RNA, 60 nt, Human
cuuucccuuagccccauucuaucugucucacagaguuuugaguccuggcuaggguggcag

SEQ ID NO: 4193447 - RNA, 89 nt, Human
cuuuccuacugccagauucuucuaauaugaucguguucaaacccagcauggcauuauuggaaggacugcugacuuuggaauugggcagg

SEQ ID NO: 4193448 - RNA, 62 nt, Human
cuuuccuagacuuugcauagaucuugacuuacaaacugcugagcaaggcacagugaggaggg

SEQ ID NO: 4193449 - RNA, 64 nt, Human
cuuuccuuaguugcaauguuugggauaugcuuuggcacuaaaucacagcauucgcaauggacag

SEQ ID NO: 4193450 - RNA, 62 nt, Human
cuuucgccucugggccauguugucagcgaaguacuuaagcacaggggcuccgaaggugaggg

SEQ ID NO: 4193451 - RNA, 67 nt, Human
cuuucuaaggaauagugcuaugaaaaacuuaauuaguguuuuauguagccacugauucuuuugauag

SEQ ID NO: 4193452 - RNA, 69 nt, Human
cuuucuacaggucaguaagaccuagacagaagaauguuuguguuuacuaaacuuguaaguaagagaaag

SEQ ID NO: 4193453 - RNA, 71 nt, Human
cuuucuauucccuuaaaggcagaaccucagagccucaaguggggccaugaggcugccuugggaagagggag

SEQ ID NO: 4193454 - RNA, 57 nt, Human
cuuucucaguguuaauuacuuugaucuucacaacaauccuguauuacacugagagag

SEQ ID NO: 4193455 - RNA, 84 nt, Human
cuuucuccguuuuucacauuucuuuauguagucuuuuguuaagaggacuucuaagcuaagaaguuguagagauaacugagaggg

SEQ ID NO: 4193456 - RNA, 63 nt, Human
cuuucuccucucuuaccugguacaauggauuaucauuucuuguuggagguggggaggggagag

SEQ ID NO: 4193457 - RNA, 62 nt, Human
cuuucuccucuuauucaucccucucucuugcuaaugaucaaguuggaaguaggaagaggaag

SEQ ID NO: 4193458 - RNA, 55 nt, Human
cuuucucugucaaauccauuuaaccucucugaaaggucaguggagaaaggggaag

SEQ ID NO: 4193459 - RNA, 55 nt, Human
cuuucucugugugguaaagggcuggcauugggguccgcccuaccuguagaggcag

SEQ ID NO: 4193460 - RNA, 92 nt, Human
cuuucugggugcaaacacuuugcaggaguaugugauaaucaguaugcuuuuaguuauuguuuauccugcaccccguguugcugccuaggaag

SEQ ID NO: 4193461 - RNA, 90 nt, Human
cuuucuguuuuccaacuacagugaguaaguagacagcuuaccuggggaaaaggugguuugcucuaauguaguccuuggaaagacacuagg

SEQ ID NO: 4193462 - RNA, 57 nt, Human
cuuucuuauaccugucagggccagguuggucccaucuugaugcagguggccuggaag

SEQ ID NO: 4193463 - RNA, 78 nt, Human
cuuucuuauuggucugugagcuguugacaugaugaauacucuuaaagaugucaucaacucacagagccaauaagaaag

SEQ ID NO: 4193464 - RNA, 61 nt, Human
cuuucuuguuauuauucaucuacuuuuccuucauguucaggaagaggugauaacaggugag

SEQ ID NO: 4193465 - RNA, 67 nt, Human
cuuucuuucucguaaacuuaguucuagcuguugguugagcaugaucgcuuuuaugagaagcaggaag

SEQ ID NO: 4193466 - RNA, 127 nt, Human
cuuucuuugugaaucagggaagaaacagaaugaaaauaguucuauagcaaucggaaucuuauaucacuaaauucugggagguagaacugaaaagcaacuucuuucuuugaaccugaaaauagaaaag

SEQ ID NO: 4193467 - RNA, 90 nt, Human
cuuugaacagaucccauccagggagcugcucugcugcagagaaaacucggacccagaagcagcuccucuaggaacggauuagcuucaggg

SEQ ID NO: 4193468 - RNA, 63 nt, Human
cuuugaagagccacagugaaauucaagccccauugaaaaggucugaaaauugugcucucauag

SEQ ID NO: 4193469 - RNA, 64 nt, Human
cuuugaagauggaucgccacucucauuuagaugaaauucuuuggagaggaguuuauuuucaaag

SEQ ID NO: 4193470 - RNA, 66 nt, Human
cuuugaaguguauuuuuguacuaacauuugaaugugugucugauguucugagaaauuacuucaaag

SEQ ID NO: 4193471 - RNA, 78 nt, Human
cuuugaaucaccucauguuaaguguuugauaaccagggucuuccuuuguuaagaucagccuuuagcauuuauucagag

SEQ ID NO: 4193472 - RNA, 76 nt, Human
cuuugacaacucaggcaccucauauaagcagaaucguacaguauuugugcuuuuguggcuggcuucuuuuguuuag

SEQ ID NO: 4193473 - RNA, 72 nt, Human
cuuugagggcaauauauuugaaucaggaacaagaacaucuugcuucuaaguauaaauaugaaccuuuuagag

SEQ ID NO: 4193474 - RNA, 92 nt, Human
cuuugauauucaggcauuuaauccaucugauugauuuauagguaucggauuaagguggaguugaaaucauugcuugagaucugacaucaagg

SEQ ID NO: 4193475 - RNA, 76 nt, Human
cuuugauggcuuuauuuuccugguggcuucuuacuucaaaagcuuccagcucucuuugaagcauaaaccaucagag

SEQ ID NO: 4193476 - RNA, 63 nt, Human
cuuugauguccucucuuguuacuuuuacaugcuggcucuaaaagugcaguugaggaaucauag

SEQ ID NO: 4193477 - RNA, 62 nt, Human
cuuugauucagacuuugucggcagaguacaauuaucauguuuucacagggcugauaucagag

SEQ ID NO: 4193478 - RNA, 98 nt, Human
cuuugcaauuuucaucauuuuauuaaccaagaaaccaaggcucagagaggcuaagugauuuccuugguauccaagaacuaguaagugauggagcaaag

SEQ ID NO: 4193479 - RNA, 62 nt, Human
cuuugcagggcaaauggucagauagcaucaggcugcucucugagacaguagccucugcuuag

SEQ ID NO: 4193480 - RNA, 100 nt, Human
cuuugcauaaugccucuaaugugaaagaugcucaaugaauggugguuucaaucccaaccaccauucauagcaucuuccauauuagaggcauuaugcagag

SEQ ID NO: 4193481 - RNA, 61 nt, Human
cuuugcauccagaaaaggguuuuguaccugggucagagauacuuuucuuuggaugcauaag

SEQ ID NO: 4193482 - RNA, 63 nt, Human
cuuugcauuccaugguuuuccuuccaguuuuaaggcuguaugaagggaauucaugagacaaag

SEQ ID NO: 4193483 - RNA, 83 nt, Human
cuuugccacauucauuacauuuguaaggcuuuucucugguaugaauuauccaauguucuauaaagugugaacugugaguaaag

SEQ ID NO: 4193484 - RNA, 58 nt, Human
cuuugccuuuucuugaguaagcugcugauuagcaggcagcuagcuaagaaggccagag

SEQ ID NO: 4193485 - RNA, 78 nt, Human
gaaugguuaucuugggcauuggcuuauauuuuggccuccgauaugggaagaaaacuaguaaugcuucuagaacuauuu

SEQ ID NO: 4193486 - RNA, 71 nt, Human
gaauguaacauccugacaagaaagccagaaagaacauacaguuucuguauuucuaugcaggauuauaccuc

SEQ ID NO: 4193487 - RNA, 55 nt, Human
gaaugucaguugcgggcauuucaaacagaauaggaaagagcccgcugagagguuc

SEQ ID NO: 4193488 - RNA, 66 nt, Human
gaaugugucagcucuuaacccucuggccuugagggccaaggcugcgguagaaggagcuuugcaguc

SEQ ID NO: 4193489 - RNA, 63 nt, Human
gaaugugucagcuguguacaaagaacaauuccuccuuguuuagucagcacagugauauuauuu

SEQ ID NO: 4193490 - RNA, 75 nt, Human
gaauguguuagaucauuucucccggccaaaaacuacugccaauaauagagugcccaauagaauucuaauauauuc

SEQ ID NO: 4193491 - RNA, 56 nt, Human
gaauguucugaggaaucagagaccauucagauaugaucuuuguccuccaggaguuc

SEQ ID NO: 4193492 - RNA, 77 nt, Human
gaauguugucacauggaauugacuagagucagaaucaguagauucaacacuaguauuucuauaagugaauuacauuc

SEQ ID NO: 4193493 - RNA, 62 nt, Human
gaauuacuagugcugauaaaggacagcuucuugaggagagaaggccuucagcucugguuuuc

SEQ ID NO: 4193494 - RNA, 76 nt, Human
gaauuacugauuuuugggcccuaccacaaacucacugaaucagaaucuuggaggugggaguccaggaaucuguuuc

SEQ ID NO: 4193495 - RNA, 111 nt, Human
gaauuaugaccugccaugggcaguauuuuucaguuaggagcuuauaaauaucucaagggccugaagaaaugacuccaaacagaaaacgaauaaacccuacaggaauacuuc

SEQ ID NO: 4193496 - RNA, 85 nt, Human
gaauuauuuugaguuaaaggcaguugaggaaaagccgaugagauuucuacccuuucccaaucugccuaaaaauggaacauaauuu

SEQ ID NO: 4193497 - RNA, 69 nt, Human
gaauucaggaagaaagaugaucuaauguuacaaaacauuaugaagcaucaucuuauuccugugaaauuc

SEQ ID NO: 4193498 - RNA, 66 nt, Human
gaauucaggcauuccuucuccugucuuuugguuaagcugacccaaagacugaggaaagucucuguc

SEQ ID NO: 4193499 - RNA, 55 nt, Human
gaauucaugcagucuugagucuacaaccaaacuguaacucaagucuaaugaaauc

SEQ ID NO: 4193500 - RNA, 73 nt, Human
gaauuccaucuugggaugcuaggaauguauucuccuuuuggagaauacauguuguuucccuggaggauaauuc

SEQ ID NO: 4193501 - RNA, 78 nt, Human
gaauuccugcucucugguagacugacacccuuuuuccaugaagaaguggucugucuuccagaucccuguuuugaauuu

SEQ ID NO: 4193502 - RNA, 89 nt, Human
gaauuccugggguucugaacucaugauaugcuuuuguaucugaagaugaucauccaaaacauauugaguagcacuacgacaggauuuuu

SEQ ID NO: 4193503 - RNA, 87 nt, Human
gaauucuaaagauauuuugagaaauggcagcauuacugggauaugagucccaguugugacuucauuucacaaaacacauuggauuuc

SEQ ID NO: 4193504 - RNA, 69 nt, Human
gaauucugagaggacaagacaaggaccagagaaagcgcuauggaacuucuuuucuuuucuucucuuuuc

SEQ ID NO: 4193505 - RNA, 106 nt, Human
gaauucugaggugaagcuacagcccagccuccuuccaguuuaaauauugacaugguuaaaaagucugcaaaggagguugggagugugguuaaucacaggugaauuc

SEQ ID NO: 4193506 - RNA, 66 nt, Human
gacugugggaaugcugaugggaucuccaagaagacaccuuagagagaugucgccuugcccaggguc

SEQ ID NO: 4193507 - RNA, 67 nt, Human
gacuguuggcucacagaugggaacggcaacugcucuggaagugcugcuccugggguaagccaugguc

SEQ ID NO: 4193508 - RNA, 63 nt, Human
gacuguuuaauacugugaguucuagucagaauuuucuggguuucacaaaaaugcugaacaguu

SEQ ID NO: 4193509 - RNA, 58 nt, Human
gacuuacacacucugcccugcuguugucaauaacaauaaagggguggagggugugguu

SEQ ID NO: 4193510 - RNA, 103 nt, Human
gacuuacagaaggagccagcagggcugauguuauugacgaagagauacuuuagacccuuuauuugucagcagggagcccugcucugugguuccucuaugaguc

SEQ ID NO: 4193511 - RNA, 92 nt, Human
gacuuacugaaaacucaucacuaauguguagcagaaccaggauucuagccaggauauccugacucuaaauauugaauguuccuuuuccgguc

SEQ ID NO: 4193512 - RNA, 79 nt, Human
gacuuagaauucccugucacuuuuucuacccuuacugaucugacuuuacugagaguugaaaagggaggacauuuaaguu

SEQ ID NO: 4193513 - RNA, 61 nt, Human
gacuuaucugagagucagauuuccugaacauuaaaggacacugaagaaucucagauguguu

SEQ ID NO: 4193514 - RNA, 113 nt, Human
gacuucacaucauacuuuuguuuauuucucauaucaauacuguagauguauuaauacaugcuauacauguacauucuguagauggagaaaauaaggccaaggaacaugaaguu

SEQ ID NO: 4193515 - RNA, 109 nt, Human
gacuucaccaagacugcacagcacagguggcuccaaguuagagccugaacucacgguucuugccucuugaagcuggaggcauuuggcugugauagguuggggugguguc

SEQ ID NO: 4193516 - RNA, 69 nt, Human
gacuucagauauuuuuuaaguugcuugcacccuauuaagcaaguaguaauauugugaaauauuggaguc

SEQ ID NO: 4193517 - RNA, 58 nt, Human
gacuucagcuguucuuagaaagcauucugcauaguuauccagagcagccacugaaguu

SEQ ID NO: 4193518 - RNA, 57 nt, Human
gacuucauauggacagcaaacuagucaaggcucaguggaucauguccuugucaaguu

SEQ ID NO: 4193519 - RNA, 116 nt, Human
gacuucauuuuccuggaaggaauuuugaugaucuauaguuuccuacauuucuauuguaggaugaaacugaaaucaaucagugauucagagacauguccagugccucuuauggaguc

SEQ ID NO: 4193520 - RNA, 127 nt, Human
gacuucuauaguuucuaaggcaucuucuauuuguaaaucaguuuaaaugggcuguuggguagacaauugcucuaauacccaaugagcugaaauaaucaacauggagcccaaggaugcuaaggauuuc

SEQ ID NO: 4193521 - RNA, 67 nt, Human
gacuucugaacuuuuuguuugaauuuucaucauauuugauucugaagcacagaaugguuuaggaguu

SEQ ID NO: 4193522 - RNA, 100 nt, Human
gacuucugcuuccagcucagagucaagcuggugcaucuuacacugcuuuggacagaggcagugugaugcuuccagccacuuucauuuggaggugagaguc

SEQ ID NO: 4193523 - RNA, 129 nt, Human
gacuucuuuuggaaaacauuuaucuuggacauuagucuacagugguucuuaucaacuacuguuuucauuauuguggaaauuagucgguuuaggaauuugggccaaugucaugaauaaugaaaggaguuc

SEQ ID NO: 4193524 - RNA, 89 nt, Human
gacuugacuggaucacagucuggauuguaaucuaaaacauuauaccuagaaauaaugacagcccucuagucugggaauucagucuaguc

SEQ ID NO: 4193525 - RNA, 127 nt, Human
gacuugagcaagguaaccagggcacagcauguugaggaggcacucacugucaggguuguagaaguucaguguuagcacuugagagugagugcuuucuuaaguuuugugcccuggcugucucacuguc

SEQ ID NO: 4193526 - RNA, 121 nt, Human
gacuugcucaccaggcaaauuuuauaguuagcaauguuguguuggcauucuauguuaaguauggaaugcuggugauaauauucuaaaaagugaaauugggcaucucugguggauuuaaguc

SEQ ID NO: 4193527 - RNA, 94 nt, Human
gacuuggagcuccacaaagcaauuacaaaagggauaaguuguauccagcaaacuugucuaacaaaguuguuuugaaguuuaaauaauauagguc

SEQ ID NO: 4193528 - RNA, 66 nt, Human
gacuugggagucuucugagauggguuccuaccaccucacucucccaauccaguuagcugccaaguc

SEQ ID NO: 4193529 - RNA, 55 nt, Human
gacuugggggaagauguggcuguguuaacgacagaaaucaucuccaccccauguc

SEQ ID NO: 4193530 - RNA, 68 nt, Human
gacuuggugccauugcuccuuugcccaccgcucccugaugcccagcagaggugucagugcccaguguc

SEQ ID NO: 4193531 - RNA, 79 nt, Human
gacuugucugaagcugauuaauaucaccaccauugguuagucccaauucuguagaguugauuaauucaucugguaaguc

SEQ ID NO: 4193532 - RNA, 107 nt, Human
gacuuuaaaacuugaggaaaauggacguguguuuuggagucaaauggaccugugcucguaugccagcuuugugacuucggacaagcuauuuaccuucccugaauguc

SEQ ID NO: 4193533 - RNA, 69 nt, Human
gacuuuaaccagcuaacauguggaaugauguacuucauucccucauuguucacuggccccaguagaguc

SEQ ID NO: 4193534 - RNA, 130 nt, Human
gacuuuaccuauuuugggccaaaggugcagucccauacagaagggaaaugccugggagaggcucucaaaguccaggcaucucucugcuucugagcuauucgauugcuuguguuccuaaaauuaguaaagc

SEQ ID NO: 4193535 - RNA, 59 nt, Human
gacuuuauaaaugagaggcggacugcauaucauuccuuuucugcuuauauuaugaaguc

SEQ ID NO: 4193536 - RNA, 63 nt, Human
cuucugaguagccacagagcgaaaggagcacauuacaccuuccucaugggguuccuucagaag

SEQ ID NO: 4193537 - RNA, 55 nt, Human
cuucugcaauaaguuuugguccaugcguuuauuggacccuaaucaucugcaggag

SEQ ID NO: 4193538 - RNA, 65 nt, Human
cuucugcaugcccucuguguggcugacaguucugggggcccaggagguugggcugugcagcuuag

SEQ ID NO: 4193539 - RNA, 77 nt, Human
cuucugccugccuccuuccccaagucgucuaggccacagacuucaggcuuagacauggagaaggagccagugggaag

SEQ ID NO: 4193540 - RNA, 64 nt, Human
cuucugcggguccuccaugugaugauguccaauugggcagcacacgguggugcccuggcagggg

SEQ ID NO: 4193541 - RNA, 55 nt, Human
cuucugcugucuuuucuccauccugcagccuggaacucagauaugauagcaggag

SEQ ID NO: 4193542 - RNA, 120 nt, Human
cuucuggaaauagauuguggugacaguuacacaccauugugaacauaauuaguaccacugaacuguacacguuaaaaugguuguauguuauauauauuuuaccauaauaaaaacuagggg

SEQ ID NO: 4193543 - RNA, 77 nt, Human
cuucuggaagagcuguucagaaauguuuauugaucaaauaaauaaauagaaucuaaacugcucaucuuaaaaagagg

SEQ ID NO: 4193544 - RNA, 83 nt, Human
cuucuggccugcccauccugccugccaaugaugcuuguguggccauagaaaggucuuuggcagacaggugcagaugccaguag

SEQ ID NO: 4193545 - RNA, 105 nt, Human
cuucuguaucuauggaguuaggguuacaccagccuccuggcaugaagauguguuuuucaacucagagcuguccaaacccugacacuuaagggguuuuuauggagg

SEQ ID NO: 4193546 - RNA, 64 nt, Human
cuucuguauuucuucagguucuucuaggaaaugguucuucugguuuuacugaggaaaucagucg

SEQ ID NO: 4193547 - RNA, 72 nt, Human
cuucugugagguaccugggaucgucaaacucagagacagaguagaaaggagguuuccaggugcuguggggag

SEQ ID NO: 4193548 - RNA, 71 nt, Human
cuucugugcaauuguggaggagacaccaaagcaucugaaauuggagcccuuccuugacaguugggugggag

SEQ ID NO: 4193549 - RNA, 119 nt, Human
cuucugugcccccaauccgcaaucuccuuccccaguuccaggggccugcugggauuggcugcaguggaagaggcucuuugagcugggagaaggguuuaugcagaaaguggggcuagaag

SEQ ID NO: 4193550 - RNA, 64 nt, Human
cuucuguguuuuaaacaguagaaagaauagagaaauacugguuuaauggguagaacacagggug

SEQ ID NO: 4193551 - RNA, 119 nt, Human
cuucuguuucucacgcaugauuaccuuguugcuguacacugccugugugugccugcagaaaguacauaauagauuuugcagauaggagguacaaagaggguguagugugagaacaaagg

SEQ ID NO: 4193552 - RNA, 65 nt, Human
cuucuuaaugacagauuaaaauaguugucaaggcucugauggggugaaacucugucauuaagaag

SEQ ID NO: 4193553 - RNA, 73 nt, Human
cuucuuacuucuguauuuuauaauuuagaguuuagacacauuuuggauuacaugaaaugcagaagaggagagg

SEQ ID NO: 4193554 - RNA, 119 nt, Human
cuucuuagcacuuuuauucuuugcuuccaaaguagaaucuucaacucagagagugcugcugaugagucgauaguacucauuuugggcugggugggggaggagagugaaaugucuaggag

SEQ ID NO: 4193555 - RNA, 130 nt, Human
cuucuuauaaauccguccucgcuguagcagauuccaguuaagcuguccaugauuuucugcacuauggaaguauuauuuaacaaauuuguguccacaguggauuaaaguuacuggacuggguuuggagaag

SEQ ID NO: 4193556 - RNA, 73 nt, Human
cuucuuaucuuacuugaaauuccaagcaggagaccuccuccucugggcuggaaaauuaauguuuuauaagagg

SEQ ID NO: 4193557 - RNA, 79 nt, Human
cuucuucaccacuuugcaccaggccuaggguugcccccauuaguuacucuuuugggucauggucccaaagggagagaag

SEQ ID NO: 4193558 - RNA, 65 nt, Human
cuucuucauuucagucugagauaagaaaaaggaagauggcauuucaggcagguggaaugaguagg

SEQ ID NO: 4193559 - RNA, 73 nt, Human
cuucuucguggauggcuguuccugggaguucuagcuccucacuagaugcucaugagucagccaguaugagagg

SEQ ID NO: 4193560 - RNA, 60 nt, Human
cuucuucucugucuccuuuuucuucccuuuggaauaaaugcacagaggccagagaggagg

SEQ ID NO: 4193561 - RNA, 56 nt, Human
cuucuugagcagcagaagaggauuggguuacugcccauuucugcagcucagagaag

SEQ ID NO: 4193562 - RNA, 75 nt, Human
cuucuugcaaaugugaauaauuacaccugauaucuccaggcacugaaauuauaugcauuugaaugauuuaggaug

SEQ ID NO: 4193563 - RNA, 97 nt, Human
cuucuugggcccuuucuugggugacucagcuggaagggggaugccagaaucuucauauaccuugcguuucacaguggccuuuaucugggcccugaag

SEQ ID NO: 4193564 - RNA, 87 nt, Human
cuucuuguaauuacaucuaaaauaagccuuauaaugauuggguguuauaaugauuguuacuggguuaauuuggacuugaaagagaag

SEQ ID NO: 4193565 - RNA, 65 nt, Human
cuucuuucuauugaucuaauaaacaucacauagcacagugaugguugaagaccaguggaaaagag

SEQ ID NO: 4193566 - RNA, 63 nt, Human
cuucuuuggggaauauucugguuguuauuuucacuuucuuagcaacgagguaaucuaaggagg

SEQ ID NO: 4193567 - RNA, 84 nt, Human
cuugaaaugucgcuagcuuuguccauugucuugcuuguucacuaagacuguaauaaaugcuugagguuugugauugauuuuuag

SEQ ID NO: 4193568 - RNA, 130 nt, Human
cuugaaauuuuguggaaucaacuauaaccacguccaaaaaugcuagugaugagaauauauuugaauagaaauucaagaauuuuuaaugugacugauguuaagugacugguaauaaagaauucuauuuaag

SEQ ID NO: 4193569 - RNA, 73 nt, Human
cuugaacacugacauuuuccugacugccaugcacgugauauauuucuuuggcaucugaaagguuaguguugag

SEQ ID NO: 4193570 - RNA, 69 nt, Human
cuugaacccagaaguuggagguugcagugagccgauauugugccauugcacuccagccugggccacaag

SEQ ID NO: 4193571 - RNA, 69 nt, Human
cuugaacccaggaggcggagguuguggugagccaagaucgcaccauugcacuccagccugggcaacaag

SEQ ID NO: 4193572 - RNA, 65 nt, Human
cuugaacguggccaugcacagaaaaaucccaauuugggaugcaucucccacagccgugcuucaag

SEQ ID NO: 4193573 - RNA, 67 nt, Human
cuugaacucaaugugaggaagaauguaguacuguuugcaacucccuuccgucauuuaguuauucaag

SEQ ID NO: 4193574 - RNA, 129 nt, Human
cuugaagcuuugcaauauguugggaugguucuguagggucuuuggugucccuugggucaggaagaucucaggcccagcccgaaucccuaaagcaauugacaucagaauagagguaaagaaguuaucagg

SEQ ID NO: 4193575 - RNA, 114 nt, Human
gaaauuaucuuacuuguugaaguggccucuuuuggaaaaagccugaacauaguuugucuauugugaucuguucuuuuuccugaagaaaauauuuucuuuuuaguuuuuaauuuu

SEQ ID NO: 4193576 - RNA, 94 nt, Human
gaaauuccaacgaaguagugauucuguuguuuuauacaucuuuuugccaaacaucaagaaugauuacaaagcaacgaaugauacauuguauuuc

SEQ ID NO: 4193577 - RNA, 68 nt, Human
gaaauugcugacaccaaguaguagccagcuccacuggaaucugcuaucuuguuguuaaaagagcguuc

SEQ ID NO: 4193578 - RNA, 59 nt, Human
gaaauuuacaacuuucucaugggaagaaagagaaaauccuaugaguuaggggaaauuuc

SEQ ID NO: 4193579 - RNA, 92 nt, Human
gaaauuuuuugcuguggcuaaagaaaaugugaaaugagauauuuauaaccauggauaccugguuuuuauuuacagucauaagaaagaaauuc

SEQ ID NO: 4193580 - RNA, 88 nt, Human
gaacaaaaggcaucuuugaucucuggaguaaauuauucaaaaugccauagccuugcaccaaaugaguuaaaauugccuaguuuuguuc

SEQ ID NO: 4193581 - RNA, 58 nt, Human
gaacaaacauuuuuggcaguauguacccauuuagcacacugccuauauauguuaguuc

SEQ ID NO: 4193582 - RNA, 61 nt, Human
gaacaaauguucuuuuuauccaguuguuuuaaaacugugugguuaaaagacacaucuguuu

SEQ ID NO: 4193583 - RNA, 66 nt, Human
gaacaagguugucucuuuauuaucuuggguauuuauacuggagagaccucagaaacaaucuaguuc

SEQ ID NO: 4193584 - RNA, 103 nt, Human
gaacaaguuuaaacugaaacugugaugguuacuaugcuuaauguuuuuguaggcauuucauaaauauuaggcaaggagauuauuuaguacuccugauuuguuc

SEQ ID NO: 4193585 - RNA, 85 nt, Human
gaacacaaggggucuugaguauuucacacuguaaagcauauguguccacauauacauagauuuugaaacuggacugcuuguguuc

SEQ ID NO: 4193586 - RNA, 65 nt, Human
gaacacagugggcuuugcauaggagcucuuaacuaagcuucaguguucccaucuguaaaauguuc

SEQ ID NO: 4193587 - RNA, 60 nt, Human
gaacacauuagucugaguuggcuaauaaauccuacagcccaucucuagcaaauguguauc

SEQ ID NO: 4193588 - RNA, 79 nt, Human
gaacaccagccuucaaggcuuagcucagaaguaacacuugucacauuugguaguuuauaggccauggaggcucauguuu

SEQ ID NO: 4193589 - RNA, 78 nt, Human
gaacacccaugguucaauuaaaaugacuuuuuggaaaaauuggauuucuaagcaaucuguaguuggaaucagguguuc

SEQ ID NO: 4193590 - RNA, 68 nt, Human
gaacacucagggccuuauccugccauugagccucucaaugauaucagcaggauguggcccgaagguuu

SEQ ID NO: 4193591 - RNA, 77 nt, Human
gaacacucauuggacaauuuuuguuuggugggcaaugguccagaaaauucagaaauuguuuuauuuaauucauguuc

SEQ ID NO: 4193592 - RNA, 60 nt, Human
gaacacugcuguuggguucugaguguuugucccucacauaggauuccagcacacugcuuc

SEQ ID NO: 4193593 - RNA, 64 nt, Human
gaacacugugcauuggauuccuggugcuccaccucagagccagcuuccauggccacgucaguuc

SEQ ID NO: 4193594 - RNA, 59 nt, Human
gaacacuucuugugccucuguguccucauuuuuaaguggauauacaagaucaaguguuc

SEQ ID NO: 4193595 - RNA, 57 nt, Human
gaacagaagaggcuggugccacuguaagccuaagaggccccaggccuagauuuguuc

SEQ ID NO: 4193596 - RNA, 70 nt, Human
gaacaggcaaagggugaaggcucauacauuuagauuagccuuuuaaagugguugcugucagccucuguuc

SEQ ID NO: 4193597 - RNA, 107 nt, Human
gaacagggagccuagaggccagaguucagggcagcuagaaccaggaaugagcgcuagagcaguucucaucuagacucugcccuugaaugaccaggacucauuuguuu

SEQ ID NO: 4193598 - RNA, 81 nt, Human
gaacagggcaggcuucagcuguuuaauaaaugucuguugaccucaaccagaucgacuguuaacagcagcaugcuccaguuc

SEQ ID NO: 4193599 - RNA, 55 nt, Human
gaacaguacuaagagcuuuacauguauuaagccaauuagcccuuaaguacuguuc

SEQ ID NO: 4193600 - RNA, 56 nt, Human
gaacaguagaugagaugcuagaauauuuggauauuuuaggaugaauuauacuguuu

SEQ ID NO: 4193601 - RNA, 76 nt, Human
gaacauacuuaucuugccuuuaacugcucaucuucugcaauaggacugagcucccugagggcaggccuuguggcuc

SEQ ID NO: 4193602 - RNA, 76 nt, Human
gaacauagauagcaaacuggcagcuugugggcuaaauacagccuaccgacauguuuuguuugcucucccaauguuu

SEQ ID NO: 4193603 - RNA, 105 nt, Human
gaacaucaggaaguaauguuugacuacaugaccuuaagguuacuucuucugcacuugcaggggucugagcuuguuagggcaguggucgcagaucugacuuuguuc

SEQ ID NO: 4193604 - RNA, 87 nt, Human
gaacauccucaggaagggguggggcaggcugugcugggcagguugcuuuccacagugacacccagucuggcccagccugagguguac

SEQ ID NO: 4193605 - RNA, 82 nt, Human
gaacaugcuugauuuuuacuguggcaaaagaacauuggagggaaaacccucaugauuuuucuuuacaguugaucauuauguc

SEQ ID NO: 4193606 - RNA, 59 nt, Human
gaacauuauuguacaaaugucuuugcauucucuugcaacuauuuuuguaggauaaguuu

SEQ ID NO: 4193607 - RNA, 66 nt, Human
gaacauuugaugaugacauuggcuuagcaccauguaguuauaauccauguucuucauuuaauguuc

SEQ ID NO: 4193608 - RNA, 88 nt, Human
gaaccaauggagaauguuacauuaggauaauuugcuguacccuagauuuguuguaguagcaaauacaugauguaauuucaguggcuuc

SEQ ID NO: 4193609 - RNA, 124 nt, Human
gaaccaccugggaugauuguuaaauauaaagauuuccagccuuuauccauccagacccucgacagcagagccucuggguguagggccuggcaacugguauucagacaagcuccccaggugauuu

SEQ ID NO: 4193610 - RNA, 68 nt, Human
gaaccauaugaaauugcccuguuuguaaguuaaaaaaaccauugaauacaggcaauuucauaugguuc

SEQ ID NO: 4193611 - RNA, 68 nt, Human
gaacccauaucuuguaauagguccacuuguuaaauuccuggcuuauggucuagaacaggauuuuguuc

SEQ ID NO: 4193612 - RNA, 72 nt, Human
gaaccccacugcauuuuggcuaguuaaaguuaauugcauaauuauugcuuugcuggcuugaaaugcugguuc

SEQ ID NO: 4193613 - RNA, 85 nt, Human
gaaccuacuauguaucaggccuagaacacagcagauaugaggaugcuguuguggguuuagcuuugagagaauuggacuuggguuc

SEQ ID NO: 4193614 - RNA, 80 nt, Human
gaaccucuacauccaggaaaggacagagucuucuuuggccugcaaggccccaauucuuuucuuuaccagaaugaggguuu

SEQ ID NO: 4193615 - RNA, 55 nt, Human
gaaccucuauauuugugacauccauuagaggagccacaagacacauaggguguuu

SEQ ID NO: 4193616 - RNA, 64 nt, Human
gaaccuguccugagugaggaguuccuggaggaucuuacacaggccucaucaaagggagagguuu

SEQ ID NO: 4193617 - RNA, 77 nt, Human
gaacggcccagggaaugagugguaccgcgggcgcccggcgcacccagcaggugccaucacucuggaugggccaguuc

SEQ ID NO: 4193618 - RNA, 67 nt, Human
gaacgugcaccaggaggucaugaguauaauaaaaaacgguuuaugaccugcacuggagcauaacuuc

SEQ ID NO: 4193619 - RNA, 55 nt, Human
gaacguggcaggcuuuacuaccaggaacgcacucggugguggaggccccauguuc

SEQ ID NO: 4193620 - RNA, 103 nt, Human
gaacuaacaauugaaaagcaucacacagauggcugccaagaugggcugcuucccagcccaaaaucugcaacccucuaagguggcuacaauuauccugagguuc

SEQ ID NO: 4193621 - RNA, 56 nt, Human
gaacuacaggugcagcaagugaguaaacaguaccagcugcuccuuggcugugguuc

SEQ ID NO: 4193622 - RNA, 61 nt, Human
gaacuagcccacugcaaauguuggcugcaguauucuaaaaagccagcacagggagcaguuc

SEQ ID NO: 4193623 - RNA, 99 nt, Human
gaacuagcggagagugcaugaaucaaagagguaaaaacguucccuccccagggaggcugccagcugucucauugauucagugcugcucuuggcugauuc

SEQ ID NO: 4193624 - RNA, 108 nt, Human
gagaaggcuggacuauguaauaucuauuaugcuauagaacuugcaaucuaauugggaggcaaaucauggaauaacuagagauuacugauaguauuaucaaguucuuuc

SEQ ID NO: 4193625 - RNA, 62 nt, Human
gagaagggaaaugggaacucaaggcaagaaugccucccuggcagcugguccccaagccucuc

SEQ ID NO: 4193626 - RNA, 61 nt, Human
gagaaggggugauguggguaauuuacaacacuccuuuguacuuucucuauuaugucuucuc

SEQ ID NO: 4193627 - RNA, 94 nt, Human
gagaagguaaggacagcuggcuggguggugccugagguccucaagccagguaggggugagguccaggccucaugauggccaucuguuccuuuuc

SEQ ID NO: 4193628 - RNA, 129 nt, Human
gagaaggugccggagugggcaguggaaaguacucuucuggucuggggaccacuagcugaaucccugaggagcucugaggccccacgggggaguccuaguuuccaggugcuucucugagcaguggugcuc

SEQ ID NO: 4193629 - RNA, 71 nt, Human
gagaaggugggcuuguagccaggaugccagcaaucagcaaggacaccugcacagccccagaaugccagcuc

SEQ ID NO: 4193630 - RNA, 81 nt, Human
gagaaguaaugagaccugagaccuaaucugacuguggugcuagcucuaccauggacugagugaggcucauuuaaucuucuc

SEQ ID NO: 4193631 - RNA, 68 nt, Human
gagaaguccuuagccuaggacgguccagccaaacugaugugcugcuguuccggcuacagcccuuacuc

SEQ ID NO: 4193632 - RNA, 78 nt, Human
gagaagugguuguuggcagugcuacagucaguaacagcgcuucugugaacaaggccaagcauucuagcaacaaaccuc

SEQ ID NO: 4193633 - RNA, 77 nt, Human
gagaagugguuguuuccagguuugaaaaauuucacaguauuauuuuaagcuacaagagacauaugccuaacuuccuc

SEQ ID NO: 4193634 - RNA, 78 nt, Human
gagaaguuauuggauuggucacacaauaguauauauacuuaaauuauaugcacuaugaugagcuagucuuaauuucuu

SEQ ID NO: 4193635 - RNA, 82 nt, Human
gagaauaaagaauugagucuaucacuugaaagagagaagagggaaaauuaucucagccaggugaacucaguuuuguauuuuu

SEQ ID NO: 4193636 - RNA, 81 nt, Human
gagaauaaguaacuugugucuuaaagauuaaauggcaaauuugcuauuaaaugugaaagacauaaaauggaauuauugcuu

SEQ ID NO: 4193637 - RNA, 64 nt, Human
gagaauaauggguaagggagguuugggaccauuugggcaccgaugcccucauucacuuauucuc

SEQ ID NO: 4193638 - RNA, 77 nt, Human
gagaauacagaggguuucaugggcagaaauucauuuucucagauggaacaagcugcccugagggccuguguguucuc

SEQ ID NO: 4193639 - RNA, 99 nt, Human
gagaauacugacucuaaaucuuuauacauuuugcugggacuuauuacuuccaacacucuuaggaagucacagaagcuugaagauuuucccgguguuuuc

SEQ ID NO: 4193640 - RNA, 99 nt, Human
gagaauaguuauuggucugagcucaagugacaguuaggaaaucugucuguucccgaggccucaggcugauugucaaggguacaggcagaugauguucuc

SEQ ID NO: 4193641 - RNA, 84 nt, Human
gagaaucacuugcaccuagggggcggagguugcagugagcugagaucaugccacugcacuucagccugggcaacagugagacuc

SEQ ID NO: 4193642 - RNA, 87 nt, Human
gagaaucgcuugaacccgggaggcggagguugcagugagccaagaucgugccacugcgcuccagccugggugacaagagcgaggcuu

SEQ ID NO: 4193643 - RNA, 86 nt, Human
gagaaucgcuugaacccgggaggcggagguugcagugagcugagaucaugccacugcacuccagccuaggugacagagcgagacuc

SEQ ID NO: 4193644 - RNA, 83 nt, Human
gagaaucgcuugaaccugggaggcggaaguugcagugagccgagaucgcgccauugcacuccagccugguaacagcgagacuc

SEQ ID NO: 4193645 - RNA, 78 nt, Human
gagaaucugcauuucuuuaaaaacuuuaaaaauucaagaguuaguuauuuuaagaaguuuuuguagagacagggucuc

SEQ ID NO: 4193646 - RNA, 62 nt, Human
gagaaugcaagaaaugugaagcuacaauauauuguaaaaaauuucgcuuuuuuuguauuguu

SEQ ID NO: 4193647 - RNA, 59 nt, Human
gagaaugcagaguugcugguggcacauuaaggugguaugcugaagaacucuuuauuuuc

SEQ ID NO: 4193648 - RNA, 76 nt, Human
gaagacauuuuaugcauacucugugccugggcauuugacauuugaaagccucccuaaagagaugcuaagagucuuu

SEQ ID NO: 4193649 - RNA, 65 nt, Human
gaagacccuucucugaggaggaagauuaccagugagaauuucuuugcuauagaugauggggauuc

SEQ ID NO: 4193650 - RNA, 65 nt, Human
gaagaccuaagguuuuagcccuuuccuugucacuuaccuuugaaaggucucugagccuugguuuc

SEQ ID NO: 4193651 - RNA, 103 nt, Human
gaagaccuuggagaucuggggcugagccucaagguacagaugaaagucuaguuucccaaaacugggccguguguguucccucaccccacuccaggcuugucuc

SEQ ID NO: 4193652 - RNA, 55 nt, Human
gaagacgagaucugugccuccaguguucgguuuauuagguccaaugcucgucuuc

SEQ ID NO: 4193653 - RNA, 71 nt, Human
gaagagacugggccaaggucagcagcuuuaaguggaaaagcugggaugugaauccagaucuuuuucucuuc

SEQ ID NO: 4193654 - RNA, 83 nt, Human
gaagagacuugguugaugucauaagguuucucagcgguuguaaaguccuuuguuuucagccugugacucagccuguauauuuc

SEQ ID NO: 4193655 - RNA, 61 nt, Human
gaagagagagcccugggguccguggaacugcuugcugcuagacuccaggcaucuuuauuuc

SEQ ID NO: 4193656 - RNA, 58 nt, Human
gaagagauagaacuaugaaaacaacuuagauuuccugguuuccaguucuaaucucuuc

SEQ ID NO: 4193657 - RNA, 89 nt, Human
gaagagcacuguuucugaaaagcuaggccaguucagcugaucauuguuagcuagagauaagcuggcuuugggaaacucugagacucuuc

SEQ ID NO: 4193658 - RNA, 60 nt, Human
gaagagcagugguugaacagaggcaucucauuuuuaugcuucuaggggcuucugcuuguc

SEQ ID NO: 4193659 - RNA, 86 nt, Human
gaagagcuauagguugcugugaccgcugccacaaccauuuggguaucacugcccaaaucaggggccacaagcauuucugccucuuc

SEQ ID NO: 4193660 - RNA, 99 nt, Human
gaagaggacaauaugccugacauaaaucuaaaggaaagggugccaauucuugaucuuuuggcccuuucuuucagacuuuauauuaacauugaacucuuu

SEQ ID NO: 4193661 - RNA, 86 nt, Human
gaagaggagaauaacagagaaggguggcuuccuauagcagagauaaagcuuugggggucgccaaauuucaugccaucuaucacuuc

SEQ ID NO: 4193662 - RNA, 64 nt, Human
gaagaggaguagagaagaccuagauguuggcuuugacucugcugguagcucauuccaugacuuc

SEQ ID NO: 4193663 - RNA, 58 nt, Human
gaagaggcuuuccuagggcaagagccagcugguggccauagcuguaagaagccucuuc

SEQ ID NO: 4193664 - RNA, 71 nt, Human
gaagaggguaggugucagaaagcccaucugagaagagcugcccacucucaggugggcacaccucccuucuc

SEQ ID NO: 4193665 - RNA, 75 nt, Human
gaagagguccuguuuguauuugcuggaacuugccuuucucucggcuucuauggcaugcugcaaacuaucuacuuc

SEQ ID NO: 4193666 - RNA, 64 nt, Human
gaagaguagaagagggaagaguagaaaacauaaauaaugaaagacuuuuccuucuauauguuuc

SEQ ID NO: 4193667 - RNA, 129 nt, Human
gaagauaagucauuuuuuuucugaucuuacacagauaauagcauuaucaucaaaacucaaucauagauguacugauccagugcuguggcuguuaagcccuucaauauaauaagaugauuaauauaaauc

SEQ ID NO: 4193668 - RNA, 85 nt, Human
gaagauaauuccauagagaugcagcaaucaccuuuuuuaaagauuucauuaaaugaagauauucuuguuuucugugguagucuuu

SEQ ID NO: 4193669 - RNA, 86 nt, Human
gaagauacaaaaaacauaacacacauaaagcacuggcgcaaugccugacucagugaguguuuccugaguguuaucauugugucuuc

SEQ ID NO: 4193670 - RNA, 85 nt, Human
gaagauaugccuaugaggcauacuuugaauuaaauauuucagaaggcugaugauagguacaagguuuuucguaggaauguucuuu

SEQ ID NO: 4193671 - RNA, 58 nt, Human
gaagaucucucaguggcuccugugucccuuugacauaggccaauacuguagaguuuuu

SEQ ID NO: 4193672 - RNA, 66 nt, Human
gaagaugaggguuauguuaguagguuuguuuguacagauccauuuuggugucaacucccagucuuu

SEQ ID NO: 4193673 - RNA, 74 nt, Human
gaagaugcauuaagggccuggagauacacuggucaacaagacaaguauggugucuccugccuucaugcagcuuc

SEQ ID NO: 4193674 - RNA, 80 nt, Human
gaagauuaggaaaccaaguuuauuccaaguuaccccaagucuugggguaaaugaauuaaaaacucugggcuucaauuuuc

SEQ ID NO: 4193675 - RNA, 99 nt, Human
gaagauucaagguguaauaaaugaacaaagcagguugccagacaacauuauauuuguaacagaugcuauguauuauguaugccacacuuguguaucuuc

SEQ ID NO: 4193676 - RNA, 79 nt, Human
gaagauuuugacacuggcugggccagcacuccugggugccaucagugcccaacucugguccaggcuagugcccaucuuu

SEQ ID NO: 4193677 - RNA, 111 nt, Human
gaagcaaaacuuugaugugauuuuaauagcauguaaguuuaaaagaccuggagguaaagguuuuagacuuuucuugucuggaaagaaagugacaucgacuuguuugcauuc

SEQ ID NO: 4193678 - RNA, 99 nt, Human
gaagcaaacaacauugacauaaagcuucuguccacagcacugauggcaguaacacagcauuggcaacaguaaagacagaauuuaucucguggcagcuuc

SEQ ID NO: 4193679 - RNA, 64 nt, Human
gaagcaaaugaaccagagguaauacuaagagauggccuugguauugauccauuuuauuuguuuu

SEQ ID NO: 4193680 - RNA, 70 nt, Human
gagagacagcuggggagagacauggcagggucggagcgcggccugcgccucugucacucagcauccucuu

SEQ ID NO: 4193681 - RNA, 81 nt, Human
gagagaccaugguuuguguggcccagaugacagcuuccuaaaacucaccugucauccuuuccauuuagacuuccuuuuuuc

SEQ ID NO: 4193682 - RNA, 92 nt, Human
gagagacgcuuacagacuauuuauuuacagaaagcuaaaagauuucuuuuucaggaguaagaguuuucauguuagauauugugaacccucuc

SEQ ID NO: 4193683 - RNA, 60 nt, Human
gagagagagagagagagcaagccugagaggcucaggcucagugcaaaucauucuguccuc

SEQ ID NO: 4193684 - RNA, 103 nt, Human
gagagagaggggagcaacagcugggugcugcucagagccccuaacugaaauggauagacaggcucaucugggaagaucuaguuuuuguucauuucuuuuucuc

SEQ ID NO: 4193685 - RNA, 60 nt, Human
gagagagaggggcgagcaaacacagguucauuaaucuguaguucgucugccuuuucuguu

SEQ ID NO: 4193686 - RNA, 61 nt, Human
gagagagaucuuuucuguguuuauggauacuugagcaaaaauacagaaggcagacucucuc

SEQ ID NO: 4193687 - RNA, 58 nt, Human
gagagagcucuggcugggugaccuugcucuggcaggguggucagggaggggcuuucuc

SEQ ID NO: 4193688 - RNA, 60 nt, Human
gagagaggcuccccuugccccaugaccaguaacuggggcugaggcaggggugcuuuuguc

SEQ ID NO: 4193689 - RNA, 65 nt, Human
gagagagggaaucuaggcucagagugccagaccaggucugcagggcccaaagauugcucucccuu

SEQ ID NO: 4193690 - RNA, 55 nt, Human
gagagagguaggggcauccuagugaccuuuugucuggaauguaccucccucucuu

SEQ ID NO: 4193691 - RNA, 69 nt, Human
gagagauggaaauguuccauauauugauuaugauuguaguuaguguguuaaugaguauauccauuuguc

SEQ ID NO: 4193692 - RNA, 63 nt, Human
gagagauggccagagagagcacaccugugcuaucgcauaggacaguuuacuuugguuacucuc

SEQ ID NO: 4193693 - RNA, 69 nt, Human
gagagaugugagaaucaagugaccaucagcugguauaaauguuuuuggucaguguagucacaggaucuc

SEQ ID NO: 4193694 - RNA, 56 nt, Human
gagagauucacaaagcuuauuuaaaaagugaacaagaaugaacuuuggugucucuc

SEQ ID NO: 4193695 - RNA, 58 nt, Human
gagagauucauguuuacuguaggcaggcgugccugucuuuacauacugaugaguucuc

SEQ ID NO: 4193696 - RNA, 102 nt, Human
gagagcaacagguguggcuuccaggugggaucaaagagucauucggauaggauuuugaaaaaacaaguuggcccauuugugagagacacaccacagugccuc

SEQ ID NO: 4193697 - RNA, 61 nt, Human
gagagcacaugaacauggaggagagaugaacagcuuccuccaaaagaagagcguggcucuc

SEQ ID NO: 4193698 - RNA, 61 nt, Human
gagagcaggcucuaggaauucaaagaccaagcaggcagagcuggauucuggagcugcccuc

SEQ ID NO: 4193699 - RNA, 80 nt, Human
gagagccgggaguccagagggcugcaggaugcugccaagcuccagccccaccaccgagcagccacuggaaccacggccuc

SEQ ID NO: 4193700 - RNA, 61 nt, Human
gagagcuggaugaaaaggauuccgaacugcuuuucaggacauccaugaaucaucugcuuuc

SEQ ID NO: 4193701 - RNA, 58 nt, Human
gagagcugggcugaaaguguuccuugagguuugccugaguuucucugagccugcucuc

SEQ ID NO: 4193702 - RNA, 56 nt, Human
gagagcuuucgggaggugcugcagugucuggcccgugcuuaccgccccagggcucc

SEQ ID NO: 4193703 - RNA, 68 nt, Human
gagaggacaccauuugccacugucacaacuggcccuguauacugucggguucaguggcagaucuucuc

SEQ ID NO: 4193704 - RNA, 74 nt, Human
gagaggacaggcaggcacuccuaggaccaucauagcagcgacccagcccugguggccagugccccuccccucuu

SEQ ID NO: 4193705 - RNA, 101 nt, Human
gagaggagaaggguuggggagcugguguguccuguccccuugcugcugacagugacugucauacagacaggacucaacucucuguccauuugucucuuuuc

SEQ ID NO: 4193706 - RNA, 96 nt, Human
gagaggagaauugcuuaaacccggagucggagguugcagugagccaagaucgcaccauugcacuccagccugggcgacagagcaagacucugucuc

SEQ ID NO: 4193707 - RNA, 63 nt, Human
gagaggagcucagucucacagggugaggaaaggcuuucuuucuuacacagucuggcacuucuu

SEQ ID NO: 4193708 - RNA, 60 nt, Human
gagaggagguggcuaugacagcuaaaugucaucuuuuacuaucauggccauccucuucuc

SEQ ID NO: 4193709 - RNA, 65 nt, Human
gagaggcaagcaggauuucaggccauuacugacaugagccugaauuugaccugcuuacuccuuuc

SEQ ID NO: 4193710 - RNA, 71 nt, Human
gagaggcagaggccugaaaccgucuagagccauguggggagcuggguguguauucaggccaguugcuuuuc

SEQ ID NO: 4193711 - RNA, 121 nt, Human
gagaggccaaauacagaaaauuuaaggagucacucacucucagggucuugcaagagaguaggauggcauuugcagacucugagagugagugccaccuuaaauucuguacuaaaugcuucuc

SEQ ID NO: 4193712 - RNA, 55 nt, Human
gagaggcccuguggucccagcugaaacauugcagcagacccccagcuagccacuc

SEQ ID NO: 4193713 - RNA, 63 nt, Human
gagaggccuucuugaucuaaacacugccuccauaggcaguaacuaggacaaggaggaagacuc

SEQ ID NO: 4193714 - RNA, 73 nt, Human
gagaggcgugugugugcuccccaggagagcuguaacgacacucccuuuccaggaaacacaaaccaggccucuu

SEQ ID NO: 4193715 - RNA, 61 nt, Human
gagaggcugcauaugcacacugucugguucacaguaagauguccaaauauaguagcucuuc

SEQ ID NO: 4193716 - RNA, 63 nt, Human
gagagggcaagguagaugcuacaaaaauuaucuuuuuccucuugaugcuuccccugcccucuc

SEQ ID NO: 4193717 - RNA, 63 nt, Human
gagagggccagggugagaacuaauguucaagagagugagauuuuguaauccucuugcccucuc

SEQ ID NO: 4193718 - RNA, 62 nt, Human
gagaggggaccugugugucuaggugaugucacucagcagcaugaugacagagucucuggguc

SEQ ID NO: 4193719 - RNA, 97 nt, Human
gagaggugaagucauuugcugaagguucauauuacugcugaaugucagagucaggauuuaaacucagacaaaucugauuucaaaaguauucccuuuc

SEQ ID NO: 4193720 - RNA, 55 nt, Human
gagaggugaccaggggugacuggcugcccuacagucaaguucaccuucuccucuc

SEQ ID NO: 4193721 - RNA, 67 nt, Human
gagagguguguuucagauaagaaagggugugugugcacuuuccugaaugugucugaagccacuuuuu

SEQ ID NO: 4193722 - RNA, 83 nt, Human
gagaguacucucccuuggagccucaggcugcagcuguucagcacucagauggggacuugagcauuccaauggggauugcuguu

SEQ ID NO: 4193723 - RNA, 62 nt, Human
gagcucgccgauccauuuccugucauucacuugagggugacaaagcaugauggugacagcuc

SEQ ID NO: 4193724 - RNA, 57 nt, Human
gagcucuuuccugcccauacugggaacggucuuuuagugauggugagugagaagcuc

SEQ ID NO: 4193725 - RNA, 116 nt, Human
gagcugagcaauccuuguagccccuauaguucgguuccuccauguugcugcuuccucccuguaaaggcagguggugggggagccguucugugcaguggaggggcagaugccagcuu

SEQ ID NO: 4193726 - RNA, 68 nt, Human
gagcugaggccagagucuucugcucgguaucugacaucaagucucugccuugggcuuggcuucagcuc

SEQ ID NO: 4193727 - RNA, 57 nt, Human
gagcugcaggcauuuauucaugcaagcuuccagcucgcuuaucuaugucugcagcuc

SEQ ID NO: 4193728 - RNA, 57 nt, Human
gagcugccaagauuacaaucaguugaauuaacuuagggcuguguucuugguagauuc

SEQ ID NO: 4193729 - RNA, 55 nt, Human
gagcugccagacaugggaaugaagccuuguuggauuuuccagucuggccagccuc

SEQ ID NO: 4193730 - RNA, 121 nt, Human
gagcugcccaguugggagucagccccacucuccucaaaggcccuuuagcagaggaggggacugcagcuccuccaggucuaggguggcuucaggguggaaggcacucucccugacauagcuc

SEQ ID NO: 4193731 - RNA, 74 nt, Human
gagcugccgcugaccgggagacuuugagcaccauguuuaauuuaucugggcuucaauuuccuuagcuaucucuc

SEQ ID NO: 4193732 - RNA, 58 nt, Human
gagcugcucaggacuccgcuuaccaaaaucugcuggguugugguagguugggcaguuc

SEQ ID NO: 4193733 - RNA, 85 nt, Human
gagcugcucccagccagcuguguggucaggcaagucauucucccagaagaugcugcaguuuguuugaccauaaagugggcagcuc

SEQ ID NO: 4193734 - RNA, 58 nt, Human
gagcugcuucugugugccgggugcaugccaaugaaccuuggcccacugaaguagcguc

SEQ ID NO: 4193735 - RNA, 55 nt, Human
gagcuggaggaccaggacugggcaaagacauugcucccagucuccuugcagcauc

SEQ ID NO: 4193736 - RNA, 93 nt, Human
gagcuggaugcgaucaucagaaaguaacacaagagguccuugcggugauggaaacgcugugugucuugacuguguuaaugucguauccugcuc

SEQ ID NO: 4193737 - RNA, 60 nt, Human
gagcuggcaaugacuuguguaucacccucuuucaaaagaagcacaaucauugacuaucuu

SEQ ID NO: 4193738 - RNA, 57 nt, Human
gagcugggccugcgagugcugccccgacggggccugcuccacaucgaggcucagcuu

SEQ ID NO: 4193739 - RNA, 60 nt, Human
gagcugggucuccaccuuggcaucuccagcacuccaccaugccaugcaggacccagcauc

SEQ ID NO: 4193740 - RNA, 60 nt, Human
gagcuggucaguuucaggagagugcacagagcaggaccucgugggacuggccuagagcuc

SEQ ID NO: 4193741 - RNA, 56 nt, Human
gagcuggucgaaaugggcugacuacaugacagguagagcgccuuuucaacaagcuu

SEQ ID NO: 4193742 - RNA, 76 nt, Human
gagcuggugaucagcuggaggauucugaguccuaaccauacccugucaugacuaaagccuucaugguccuagacuc

SEQ ID NO: 4193743 - RNA, 56 nt, Human
gagcugguggugagaaagcucucucaaagccugacaagucaucuccucuacugcuu

SEQ ID NO: 4193744 - RNA, 66 nt, Human
gagcugucaaucacuuuuaccaaucagcuauuuuugauagaagaucuuaaaagcugacugcaguuu

SEQ ID NO: 4193745 - RNA, 56 nt, Human
gagcugucucuauaugaaugcucaguaaacaugccagucaucugcagggauagcuc

SEQ ID NO: 4193746 - RNA, 59 nt, Human
gagcugugaaaagugccuggggcaccuuguggguguuaaaaaggauugguuauaagcuc

SEQ ID NO: 4193747 - RNA, 57 nt, Human
gagcugugguaggcacagagaacaagaaacuauuucuugaaaagccuacagcaguuc

SEQ ID NO: 4193748 - RNA, 79 nt, Human
gagcugugguguuaacuggauuucuuucugaacaaagucauugaccauuuuguaagcaaaaaguccauucuccaagcuc

SEQ ID NO: 4193749 - RNA, 67 nt, Human
gagcuucaugccuaaagacagcgucuuaaacugcuugaauggcugcgagugucuuagcaugagguuc

SEQ ID NO: 4193750 - RNA, 57 nt, Human
gagcuuccucagccuuucucacccaggaccuuaaccuugauccagcuguaggaacuc

SEQ ID NO: 4193751 - RNA, 73 nt, Human
gagcuucuugccgauggccgggauuuuaaaacugccucuuuagucccagcccaguccuguaagcaacagucuc

SEQ ID NO: 4193752 - RNA, 63 nt, Human
gagcuugaugaaauuuuucaauugucuugaaagggcaguuauauuguuuuauucauguggcuc

SEQ ID NO: 4193753 - RNA, 60 nt, Human
gagcuugugauagaaggagcgguaguccuuuggcuuuaguuccagguggucacagagcuc

SEQ ID NO: 4193754 - RNA, 79 nt, Human
gagcuugugugggucaacugggauaaagagcuaaagaggucccuuuucuuccugcuuugucccaugucaaccacaacuc

SEQ ID NO: 4193755 - RNA, 61 nt, Human
gagcuuuaaucugagggaacuugaacuccguguaguugggguucaucucucggauuuguuc

SEQ ID NO: 4193756 - RNA, 61 nt, Human
gagcuuugaucgcuaagccucagggugggugagcauuuuuugaggcugccaauccaagcuu

SEQ ID NO: 4193757 - RNA, 67 nt, Human
gagcuuuuauaccuucucucagaaacacauaguaacauucugguuccaaagagaugguguagaguuu

SEQ ID NO: 4193758 - RNA, 123 nt, Human
gagcuuuucauuaauuugugccagaccauuuaauauauucuacaguguucuuguuucacuuaauuuucuggauuuccaagaaagcuuuaggauuugguuuggugagaggccuugaagggacuc

SEQ ID NO: 4193759 - RNA, 77 nt, Human
gagcuuuucuuuauacaccugcugagccuguccucagccagggguuaagaggauaaaaggcucaaagcagcaggcuc

SEQ ID NO: 4193760 - RNA, 82 nt, Human
gagcuuuuucauagauaucuuucuuauuugaagaaagauaguaucuaucuguuuuagauaagaaaggcuugugcaauaguuu

SEQ ID NO: 4193761 - RNA, 97 nt, Human
gaggaaaaugaagaaauggugaagaagaagaagaugauguugaauaaguugguucuagcacaguuucuuuuccuugucuauaaagcauuuaacccuc

SEQ ID NO: 4193762 - RNA, 83 nt, Human
gaggaaaccauugcugcccuaauaucacauguuacaagucuucgagcccaugguaucugagauguuaggagcuagcauuccuu

SEQ ID NO: 4193763 - RNA, 75 nt, Human
gaggaaagcugguuuaaaguaucugagugaaauaagaggaaaaccccaaauacuucaccuaacccaguuucccuu

SEQ ID NO: 4193764 - RNA, 62 nt, Human
gaggaaaggcuauugcugauaauguuuucaguggaaaaacauuucacccauggucuuuccuc

SEQ ID NO: 4193765 - RNA, 64 nt, Human
gaggaaagggcaggaagaggagccccugucugagaaacacagucagggucuggcccuguuccuu

SEQ ID NO: 4193766 - RNA, 129 nt, Human
gaggaaaggugcuuacuaaauucaagaaaugguguuuuuuucuccuuauucauaguugucuccuuggagagaccauauugaggggaaccugccaggaacacuuuuugaaaaagucaauuauucuuccuu

SEQ ID NO: 4193767 - RNA, 85 nt, Human
gaggaaauguuuuaaaagugugcaccuuuuguaaaaaggcuagagaagcccuuuauacuaaggcauacaauagacucauuuucuu

SEQ ID NO: 4193768 - RNA, 66 nt, Human
gaggaacagauauuuggggaaagacguuaguuuuagacgcugaguuucagguuucugagacuucuc

SEQ ID NO: 4193769 - RNA, 77 nt, Human
gaggaacuagagagaagcugugugaccuucccuaacuucaccugagaaguuacacagugucacuucuaccacacuuc

SEQ ID NO: 4193770 - RNA, 82 nt, Human
gaggaagaagaaaccagcuccagccuccauucacccugggaugggguaugggugggcuggggugguaaugaaggucuuccuc

SEQ ID NO: 4193771 - RNA, 63 nt, Human
gaauacauggcuuuuuuagucugucuaggaagacccuuaacagaauaguuggcccugcuauuu

SEQ ID NO: 4193772 - RNA, 130 nt, Human
gaauaccaggauucugaagcaaugagagugggauugggagagagagcucauguugaagaagaaauaacucaccaguucacaugggcuccuuuucaaggguuuuucuuuauauaaacaauuugccugguuc

SEQ ID NO: 4193773 - RNA, 90 nt, Human
gaauaccauuaaucuguucacuaggagauuaauuugcaauuuguuggcaaaucacaugugggucuuguagcaagagcgugggugguguuu

SEQ ID NO: 4193774 - RNA, 55 nt, Human
gaauacuucucacugugaaauaggucuuuauuauguuuuaaagugacugguauuu

SEQ ID NO: 4193775 - RNA, 66 nt, Human
gaauacuugaagaggacuuugcagcugucuggaguucucuguauagcucuuuccuuuccaguauuc

SEQ ID NO: 4193776 - RNA, 60 nt, Human
gaauagaaucaagaaaaugaggauucuucccuucugggaagcaauacuucuugguuauuc

SEQ ID NO: 4193777 - RNA, 59 nt, Human
gaauagaauugcauaauuuuaggguuuuaagcacccucaguaaucgugcaguuuaguuu

SEQ ID NO: 4193778 - RNA, 86 nt, Human
gaauagcaaagugacagggaagcagucagcagucaggcaucauucagcugcccaggauaaugcugucccugugcacagggcuguuc

SEQ ID NO: 4193779 - RNA, 67 nt, Human
gaauagccuacugggcuucuguguagcacagcacuguguaagucgcagguguucaguaaauguauuu

SEQ ID NO: 4193780 - RNA, 80 nt, Human
gaauagcuguaggcuagugucuucagagaccaaucuauacucucucccagguaucuguuuuuacuuguuugcuguuguuc

SEQ ID NO: 4193781 - RNA, 78 nt, Human
gaauagguugucagugguuauacuuacuguuucuccaccaggaugaaauuauauuaaaaucacuugaauggccucuuc

SEQ ID NO: 4193782 - RNA, 78 nt, Human
gaauauagugauuauaucaguaaaaacauuguaaagccacuauaauagcucacaguguaugauauuucacaguuguuu

SEQ ID NO: 4193783 - RNA, 79 nt, Human
gaauaucuuaagauuuauaguaggaugugacaagucuaacagaggcuuacaaacugucauauaguauuuuaggauauuu

SEQ ID NO: 4193784 - RNA, 117 nt, Human
gaauauguacaugaacaaaauagcagaaagaaguacaggacaaaaucuaggcauguucagaauaacaugccuagauuuuguccuguacuucuuucugcuauuuuguucauguuauuc

SEQ ID NO: 4193785 - RNA, 68 nt, Human
gaauauucagaaaagugucugacguggagcaagcacucaguaacaugcagauauuuuuauugugguuu

SEQ ID NO: 4193786 - RNA, 66 nt, Human
gaauauucuugaaggaguacugugauaugaguaaaucacucauuuguaccauuuuuuaagagucuc

SEQ ID NO: 4193787 - RNA, 59 nt, Human
gaauauugaauuguuuguggaauuucaugaggccauggacuuucagacauuucaaauuu

SEQ ID NO: 4193788 - RNA, 64 nt, Human
gaauauuuucauguuucaaugggaucaguuuuucuaauucugacuauuggaaaagaaaauauuu

SEQ ID NO: 4193789 - RNA, 74 nt, Human
gaaucacaacccugcuuggccccacuucuauaaguuuggcuuuggaaacuuuaugccaagaggcuuuugaauuc

SEQ ID NO: 4193790 - RNA, 62 nt, Human
gaaucacagaggcaaauucugaaaagaugggugaaauccaaucagauagcacuuuaugauuu

SEQ ID NO: 4193791 - RNA, 119 nt, Human
gaaucaccugcagcguuuguuaaaacccaaauuccaggccuuucucccagacuuucuaauucagugggccuaggguuggccugagaaucuggauuucuaauaaguucccaggugagauc

SEQ ID NO: 4193792 - RNA, 90 nt, Human
gaaucaccuggggacuuuguaaauauauagaccucgacucaguaaaucugaguaaaaauucuacauuuccaaccagcucccaggugauuc

SEQ ID NO: 4193793 - RNA, 61 nt, Human
gaaucagauacugauuucagucauuuuuaauggcuuauugacuuaauauugguacugauuu

SEQ ID NO: 4193794 - RNA, 57 nt, Human
gaaucaggagccauguggauucuaaauuuaugauucagcagccauggcuucugacuc

SEQ ID NO: 4193795 - RNA, 77 nt, Human
gaaucauguugaugaagugaugcaguguaauccccaccuuguuaauugugugauaaugcaguccuuugacaugauuc

SEQ ID NO: 4193796 - RNA, 83 nt, Human
gaaucauucagucaugcugguuuugauccacaugguuuucaagccaguugaguuauuuuaagcacagcaugaaagaagaauuu

SEQ ID NO: 4193797 - RNA, 56 nt, Human
gaauccuggaaucaucugagaucaaaauagcaggucuggaagaagcagcaggauuc

SEQ ID NO: 4193798 - RNA, 91 nt, Human
gaaucuauggcccauuacccagaggaacguuuggauugauuaucagaaguacacuucaaggaauucaaauuuucucuggagucauagauuc

SEQ ID NO: 4193799 - RNA, 79 nt, Human
gagcaaaggguauuuucauaaaaccauggaaucuuugaguuggcuaaaucuccauaaauuuuaugaacauauuguguuc

SEQ ID NO: 4193800 - RNA, 61 nt, Human
gagcaaaugaagagggagaaugugguuugcaggcuuaaaauucaaaccucauuuauuguuc

SEQ ID NO: 4193801 - RNA, 75 nt, Human
gagcaaauguacaauagucccuguuuggaugcaccauacuuuauucaaguucacuacuguuggacauuuauguuc

SEQ ID NO: 4193802 - RNA, 64 nt, Human
gagcaacagggcgaggagaacuggacccugguucuggcucugggaugacuuugcccuguggcuu

SEQ ID NO: 4193803 - RNA, 68 nt, Human
gagcaagcugcuuaagcucauugucucauaauuuuccaugagcauaaugaguauagcauugcuuguuc

SEQ ID NO: 4193804 - RNA, 58 nt, Human
gagcaaggcagcguuccuuucuggacccucuagaggagaauccaggcguugcuuucuc

SEQ ID NO: 4193805 - RNA, 76 nt, Human
gagcaaguaucagcacaucuccaagaauuucugcagcagaaauucauggagacggugccaucaagugauuuagcuc

SEQ ID NO: 4193806 - RNA, 64 nt, Human
gagcaaugcccuucaccagccccuguauggauaggaagcaggggcuggagaggagguuuugguc

SEQ ID NO: 4193807 - RNA, 67 nt, Human
gagcaauggaagauagauaacaaaacuuuuggugaaguucuacacugccuaucugucuuugaugcuu

SEQ ID NO: 4193808 - RNA, 116 nt, Human
gagcaauuguuuuugucaccccuuuucuuccuggcaugccuugaacauaguggacaguaauaauuauuguuaccauuugugaaggcuuacuaugugccaggaaaugcaguaugcuc

SEQ ID NO: 4193809 - RNA, 59 nt, Human
gagcacagaaggagaaauauggccccgaggggcuagcauauuccucuaucucauuguuc

SEQ ID NO: 4193810 - RNA, 130 nt, Human
gagcacagaugguugccaguccccucuucagauacguggagccuagagugcugagucugggcugaagugcaguacuuguccucagguguuauugugugaggcugaggggaaaagcuagaaaccaugucuc

SEQ ID NO: 4193811 - RNA, 74 nt, Human
gagcaccaaggccaguucaccaagggcaaaaucccuacuuguguccuuccuguugaagggcuucugugauacuc

SEQ ID NO: 4193812 - RNA, 59 nt, Human
gagcaccuggcagcuaagugcuuugagaucuuucagaugaaaagggcugucaguuguuc

SEQ ID NO: 4193813 - RNA, 57 nt, Human
gagcacuaggcaugguuguaaaaaucuagacucuuuucauccauggcuuuugugcuu

SEQ ID NO: 4193814 - RNA, 82 nt, Human
gagcacugaauuuuuauccaguuuuguuuaucauuucagcuaggccauuuggcacugggaaugugagcagcuggacagccuu

SEQ ID NO: 4193815 - RNA, 58 nt, Human
gagcacugccucuguggagaauguauaaagagauacaaaggaacacaggcaugugcuc

SEQ ID NO: 4193816 - RNA, 83 nt, Human
gagcacuuaaauaugagcagaauugauguuuggcauuucuguguggagucauuuaauugguuuugcucgucuuucuaaguauc

SEQ ID NO: 4193817 - RNA, 83 nt, Human
gagcagagaugagacaugcauuaagacacacugaaucuaacuagaaauuuaucagaaauguuauauaugcuuuaucucugcuu

SEQ ID NO: 4193818 - RNA, 81 nt, Human
gagcagauuggcacuuuuaggcaguaccgaauuaacaucaaaaugucauugcugagccauaagguugcccccauuuuguuu

SEQ ID NO: 4193819 - RNA, 72 nt, Human
gagcagcagacccagagcagagcuuggcuuccugcaaggaaaucugcccagugcacugguuggcugcugcuu

SEQ ID NO: 4193820 - RNA, 65 nt, Human
gagcagcccuuucugggcaggggaauacauacauacacauaacucucacagcccuggggcuguuu

SEQ ID NO: 4193821 - RNA, 77 nt, Human
gagcagccugaggagcgugggccggucacuugcuauagcagccaucccgggaagucacuguucaucacggcaugcuc

SEQ ID NO: 4193822 - RNA, 91 nt, Human
gagcagccuggagagccuggaccugagcuacaaccccaucuucuccuccucccuugucguugucagcuuccuccacgcccugcgcgagcuc

SEQ ID NO: 4193823 - RNA, 64 nt, Human
gagcagcuggcuguauugguuuguaaggaaaugaugcaacaagccaauaacaguagucugccuc

SEQ ID NO: 4193824 - RNA, 64 nt, Human
gagcaggaaucacaugcaacuggaggggucagcaaugagggccaggagcugugugcuuccuuuc

SEQ ID NO: 4193825 - RNA, 60 nt, Human
gaggaagaagggauuagaacucucggccaccauacugccucguucugcagcuucuuucuc

SEQ ID NO: 4193826 - RNA, 60 nt, Human
gaggaagaaucaggguggugaggcaauuaguagguguucuacaauccugacaucuuucuc

SEQ ID NO: 4193827 - RNA, 57 nt, Human
gaggaagagcauggccaguuucuacaaaggggccuuuggccagcugcucgucuccuc

SEQ ID NO: 4193828 - RNA, 57 nt, Human
gaggaagaggacagagugguuuugggaguuauuuaaccacucuaaccauauuuccuc

SEQ ID NO: 4193829 - RNA, 84 nt, Human
gaggaagcagaauagauucaugguuaagagcacagauccuggaaccagaaugccugaaaucaaauccuaguucugucacuccuu

SEQ ID NO: 4193830 - RNA, 101 nt, Human
gaggaagucacauuucuugugugccugcucuugagacuuacaacugccacugucguugugucuccucucuggguggcagggaauacugaagaaauuuccuu

SEQ ID NO: 4193831 - RNA, 73 nt, Human
gaggaauaauaucuggcauucaaacaugacuggggaaaguuuauguuccaauuagccagaauggaaaaaccuc

SEQ ID NO: 4193832 - RNA, 130 nt, Human
gaggaauacaugggaagaacgcagggaauuuuuagggcagugagacuauuuuauacaauacuauaauguuggauacaugucaucauauguuuguaaaaauccauaaaauguacgacacaaaagcaaacuc

SEQ ID NO: 4193833 - RNA, 74 nt, Human
gaggaauauguacgggauuugacuccuggauccaccaucuuccugugaugaucuugagcaaguuguguaaccuc

SEQ ID NO: 4193834 - RNA, 76 nt, Human
gaggaaugucagcacaggccucucucaggaugucccuucucugacauccugagagaggccugugcugacauuccuc

SEQ ID NO: 4193835 - RNA, 65 nt, Human
gaggacaacuagaucaaggcaagcacguggccugggugugcuucagcagggaucggggggucuuc

SEQ ID NO: 4193836 - RNA, 62 nt, Human
gaggacaagcugugagugggguugcagaacaagucuggagaacccugcuuuaugccguccuc

SEQ ID NO: 4193837 - RNA, 77 nt, Human
gaggacauauuuugaaagcuuucuaauccuugcuaugacaaugacugaacuuuuagagggcucagaguuagagcuuc

SEQ ID NO: 4193838 - RNA, 81 nt, Human
gaggaccuguuuagugaggugaggaguaacuggcuaugguuuuaugaugccacggcuucuccacuuccucaagcuggccuc

SEQ ID NO: 4193839 - RNA, 67 nt, Human
gaggacuggugaggacugguaaggacugcagcacccugggcuggguccucaccuccucacuggccuc

SEQ ID NO: 4193840 - RNA, 62 nt, Human
gaggacugguggcugauuaauguucaaugacccacggggacagcccaggccgacaguuccuc

SEQ ID NO: 4193841 - RNA, 56 nt, Human
gaggacuucauggcagauugcuggagcuaagaaaggcaguaugucuaugagucuuu

SEQ ID NO: 4193842 - RNA, 63 nt, Human
gaggacuuggucagcuucuucccucaaggcaaugggugcucagugaagaaguuggaggaucuc

SEQ ID NO: 4193843 - RNA, 122 nt, Human
gaggagaaaaucaaggcugagagacuguuacuugucugagguccuacuauaaguggcagagccagaauuugaauccacauaugauagggcaucucuaagagggucuccaugauucuccccuc

SEQ ID NO: 4193844 - RNA, 82 nt, Human
gaggagaaagagaggacaggauugagcugaacuguucaggagcuggaaugguuaggacuuggauuguccagagaguuuucuc

SEQ ID NO: 4193845 - RNA, 64 nt, Human
gaggagaagcuauuggaaggacauugcugugaauauuccugucagcuuucaugugguucuucuu

SEQ ID NO: 4193846 - RNA, 66 nt, Human
gaggagaaguacaaaggacauggaaacagccggcggggaggcugccauggauagcugugcuuccuc

SEQ ID NO: 4193847 - RNA, 81 nt, Human
gaggagaggguggcauuaaguuuucauacugaaugauaaaccuaucucauuuaaauaacaaacugaaugaaaucccuucuu

SEQ ID NO: 4193848 - RNA, 69 nt, Human
gaggagaggucaggagagaaggcuggcugaggagcgccuggacagcagcaguugcugacguucuauauc

SEQ ID NO: 4193849 - RNA, 81 nt, Human
gaggagaucaguguauuuccugcauggugauguaaguggugagaaaaaugcggcuguggcggugcaagaaauaagcuccuc

SEQ ID NO: 4193850 - RNA, 77 nt, Human
gaggagaugaauggauggaugccuccaccugucucaccaccaaugagcccacugaagcauucgccuucacccuccuc

SEQ ID NO: 4193851 - RNA, 94 nt, Human
gaggagccauggagugggggcuggcucugucuguauguucagcaauggauccagcagagaagaugcccaggcuuccagacacccuuggccacuc

SEQ ID NO: 4193852 - RNA, 113 nt, Human
gaggagcgggggggcggccugagagcccagggucaggguguggggccacuucagccacuccccugccaguggccuugggcacugaccuugggcaggccuuccucccuauccuc

SEQ ID NO: 4193853 - RNA, 71 nt, Human
gaggagcucaugaaagcgguguucacagcaugcugcaguugcucacaucguaguucauaaggcauuuucuc

SEQ ID NO: 4193854 - RNA, 65 nt, Human
gaggagcuguucccucaccucuggaagaaaaggaccucccugaggccaggggagucagcguccuc

SEQ ID NO: 4193855 - RNA, 65 nt, Human
gaggagcuugaggcuaggagccugauuuacuuccuguggacuugcacccuagcccagugcuucuc

SEQ ID NO: 4193856 - RNA, 74 nt, Human
gaggaggaacaggaggagcagcugugugcccaggcucagccugcagagggacagcagcucucauuccccucauc

SEQ ID NO: 4193857 - RNA, 62 nt, Human
gaggaggaaugaagccuuaggcauacaaauaauaaacuggaagccuggaguuaguuuuccuu

SEQ ID NO: 4193858 - RNA, 67 nt, Human
gaggaggaccaggcaaggucagcaccuucugugcuacagagaggcccaugugagucuuguccucuuc

SEQ ID NO: 4193859 - RNA, 89 nt, Human
gaggaggagccccacuggcagugcugaggagagguacuccagcuccaggccuggagagccuucccggcaucgccugcggaccccaccuc

SEQ ID NO: 4193860 - RNA, 57 nt, Human
gaggaggcaggugcagccucaguuagcaggaagccccugagaagcuccugucuccuc

SEQ ID NO: 4193861 - RNA, 79 nt, Human
gaggaggcugagcccccucugcguagggaucaaggggcugaacccucucugcgugggacugaggaggcugagcccucuc

SEQ ID NO: 4193862 - RNA, 64 nt, Human
gaggagggaagauuccccauaugggucaugauauuacugccccaaggggagauuuucuugaguc

SEQ ID NO: 4193863 - RNA, 60 nt, Human
gaggagggggaugcaccuggggugcuggaaacaugcgugcagggguccuccuggagccuc

SEQ ID NO: 4193864 - RNA, 78 nt, Human
gaggaggggucagugaugucaggugccucagcaggcugauugccacugaguucccugacauuucaaggcagccucuuc

SEQ ID NO: 4193865 - RNA, 74 nt, Human
gaggaggggucuggguggccuucauagcucagggugagauacccuuggguccugagugaccccauccccuccuc

SEQ ID NO: 4193866 - RNA, 72 nt, Human
gaggaguauucauuuugcaugaaaggaccagaaguauuccccggcuuuucauguguugaauguguacagcuc

SEQ ID NO: 4193867 - RNA, 80 nt, Human
gaggagucacugcagguuuuucaggaggagagugacaacacaaucuaguaccucuucgagagccagcagccacaguccuu

SEQ ID NO: 4193868 - RNA, 96 nt, Human
gaggagucauauuuggggccuuggcacucauccugguuguuuacgcagguguaaacccguacgcgggauguaguuccaugcacucaugguuuccuc

SEQ ID NO: 4193869 - RNA, 82 nt, Human
gaggagugcuugcuggcagccuauaaggccucacugggugggguuaaccuagugauggcaucggguccagcaucugguccuc

SEQ ID NO: 4193870 - RNA, 67 nt, Human
gaggaguggaguugcuggguuguaugguuaguguaugucuaacuuuucaagaaacugccacaccauc

SEQ ID NO: 4193871 - RNA, 61 nt, Human
gaggaguggcagcuaggcugucagucaacuguguugauuuccguagcugccacaauaccuc

SEQ ID NO: 4193872 - RNA, 93 nt, Human
gaggauaaagggaauccugaaucugaagcagauguggcugagaucuuuggcccaugaaaggugcucagugagugcuucauuuccuuugucuuc

SEQ ID NO: 4193873 - RNA, 70 nt, Human
gaggauaaagucuuuagguggacagauuaggaaaguccugugcugucuacuuaaagacuuuuugucauuc

SEQ ID NO: 4193874 - RNA, 72 nt, Human
gaagcuggugcucacuuucaucauugccugaguuuucccaagcagcuuuugaagagugaggaacuaaguuuu

SEQ ID NO: 4193875 - RNA, 124 nt, Human
gaagcuguauaaauuaucaaguaauaugagaauuggaaaauaucauuauaaguaacuugugaaaaccccugauguuuuaaauuagccaugaaaugugacuuacuuuguaauauuaugaagcuuc

SEQ ID NO: 4193876 - RNA, 65 nt, Human
gaagcuuaacaguacuaaagaagagaaguuggcaaacucguucuuucugaauacaguugaguuuc

SEQ ID NO: 4193877 - RNA, 70 nt, Human
gaagcuuggcuguguucaagggcggcuggcuacugucagucucaccucccuuaacacuuuuguuaaauuc

SEQ ID NO: 4193878 - RNA, 70 nt, Human
gaagcuuuaacuauuaugaaugccuggguaccauucugauguaaugggccuggguuguaacuagugcauc

SEQ ID NO: 4193879 - RNA, 56 nt, Human
gaaggaaaaauacucuguaagguuucaaaaacagccgauugcagagauuguccuuc

SEQ ID NO: 4193880 - RNA, 129 nt, Human
gaaggaaacacgagaccuuggcaucccucucacucgaaggcauggcaggguuuacacaauuaggcuuaauuauguccugcucugcuuucagugaguguguuccuugcagguggagucuggcuuucccuc

SEQ ID NO: 4193881 - RNA, 72 nt, Human
gaaggaaauaaauaauuuguggccacauuguggaacgugauaaauuguuucauggccacagauucuuccuuu

SEQ ID NO: 4193882 - RNA, 60 nt, Human
gaaggaaccugagggaccccaaacucagccacucuuguaguuucccucuccgguucuuuu

SEQ ID NO: 4193883 - RNA, 74 nt, Human
gaaggaagaagagauaauggggagcaaguacaaggggaaacgagaugaugucuugccccucuuuucuuuccuuc

SEQ ID NO: 4193884 - RNA, 63 nt, Human
gaaggaagcuuucuguguuaaugcugcucgucagagacaguaauaacacagaaaguuugcuuc

SEQ ID NO: 4193885 - RNA, 95 nt, Human
gaaggaauacucauggcaguggugauaaccgcuaucauagcuaccauaaaauuacucguugugacugguugucccgcuuuccucagguuuucuuc

SEQ ID NO: 4193886 - RNA, 110 nt, Human
gaaggacuguccaggcugggaaugagguuaggguaucagaagcacagcccccugagggcugagucaucuggggccuccuggaucuguucugcaguuugaaugcagccuuc

SEQ ID NO: 4193887 - RNA, 125 nt, Human
gaaggagcaaacauugcacacagggaagugguuauaacacagguuugugguaaauaagaagcugucaaaggccuuauccagagcuugugguuguagccagcugagacccaauguaugcucacuuc

SEQ ID NO: 4193888 - RNA, 63 nt, Human
gaaggagcuaaagggagcccugccggcacauaacgaccgccgggcuccaucacaggcuccauc

SEQ ID NO: 4193889 - RNA, 59 nt, Human
gaaggaggcguuagcccuaggagguaccugaaguuaccugggggcaacgcguuuucuuc

SEQ ID NO: 4193890 - RNA, 85 nt, Human
gaaggauggagaagcacaaaacacauuuugacaaugugcugguguuugcagcuggaaacuuggcgcaugucagaucccauccuuc

SEQ ID NO: 4193891 - RNA, 73 nt, Human
gaaggauguauagggccaugacaccacuccugaugauacuacaaugguggacgcaugucauuauacauuuguc

SEQ ID NO: 4193892 - RNA, 73 nt, Human
gaaggauucaccuguuaguaaaaaucuguaguuugaccuacaugaaagaugacagcuacgggaugaaaauuuc

SEQ ID NO: 4193893 - RNA, 75 nt, Human
gaaggcagauuuuaaaaaugucguuaccagaacgcauccuccauuucucaguaaacagguuuaaguccugcuuuu

SEQ ID NO: 4193894 - RNA, 60 nt, Human
gaaggcagcagugcacgacugauguaagugaggcauuagggcaaaccacugcaugcuguc

SEQ ID NO: 4193895 - RNA, 62 nt, Human
gaaggcaggaugcggacccaucuugguagcccagaagacagggccacucauccucacccuuc

SEQ ID NO: 4193896 - RNA, 63 nt, Human
gaaggcaggggacccucacucuaugcugaaggggcugggggcugagauuggugcccugucuuc

SEQ ID NO: 4193897 - RNA, 58 nt, Human
gaaggcagguuuuucaaaacugggcuaagcaauuaucaaacugaacuaaccugcuuuc

SEQ ID NO: 4193898 - RNA, 55 nt, Human
gaaggccauugcguccugggauucuauuuuuugaccugauguucacuuggccuuc

SEQ ID NO: 4193899 - RNA, 88 nt, Human
gaaggcccuucucuccagcagagccagauuuuaugcaagacauuuaguaugucaaaguaucagucucuggccuuggaggcaggucuuc

SEQ ID NO: 4193900 - RNA, 69 nt, Human
gaaggccggagcagcagcuuuuacugggggacaacccauuuccagcagcuaccugcucuuguggcguuu

SEQ ID NO: 4193901 - RNA, 61 nt, Human
gaaggccucacucugcagcauaaggguauuuuauacuuagcugacaaguccagagcccuuc

SEQ ID NO: 4193902 - RNA, 106 nt, Human
gaaggcguguccugccagaggugaggggaucugggcccacucaacuucacugauguaggcagugggguccaucccuucccucuggcaugaggaaguaugcaucuuc

SEQ ID NO: 4193903 - RNA, 55 nt, Human
gaaggcuacuucuccucagggccacagagagacgggcccugaggcaaaagccuuu

SEQ ID NO: 4193904 - RNA, 84 nt, Human
gaaggcugggaguccaagaccaaggugucaccagaguuaguuucuucugaggucucucgccuuggcuuguagaugaccaucuuc

SEQ ID NO: 4193905 - RNA, 69 nt, Human
gaaggcuguggcuggucucaguuugguuacucaaugcccaggaggggcugagcaccagccauaucuuuu

SEQ ID NO: 4193906 - RNA, 59 nt, Human
gaaggcuuaaugguucuuuuucucauuucaggucaaaggugaguuacaauugagucuuc

SEQ ID NO: 4193907 - RNA, 68 nt, Human
gaaggcuuccaggugcuucuguaagaaagacaccugugaucuccccuucuaaguaccuuaagcugcuc

SEQ ID NO: 4193908 - RNA, 93 nt, Human
gaagggaagaauugaagcagcauugugguaggggagcacugaaaccccauugcaucccccaucugugcccaauuuguuccaaucuggcccuuu

SEQ ID NO: 4193909 - RNA, 72 nt, Human
gaagggcaacaacuggacauagcuggcaacuaguccuaauggccauugcagcuguguuucaaaugaauuuuc

SEQ ID NO: 4193910 - RNA, 85 nt, Human
gaagggcuggcauggaagggcugaguucuauuggggucccacgcgggcaagggaaccaggacucaucccugcuugucagccaauc

SEQ ID NO: 4193911 - RNA, 74 nt, Human
gaaggggucuugggaggagagaggguggacccuguucccaggcacucuguuucuccugucagccuugccucuuc

SEQ ID NO: 4193912 - RNA, 129 nt, Human
gaaggguccgcugcucaggcagcauccccgugccucuccuccagugggucccucagguagaaucggggcaggccccacuggacgugcagggaggaggcucggaggaugcauccuuugcaggacccgguc

SEQ ID NO: 4193913 - RNA, 57 nt, Human
gaagguagagaggaguuucugcauguuguucauguuuaacacugcuucuauauuuuc

SEQ ID NO: 4193914 - RNA, 71 nt, Human
gaagguagcacuauagggucuugccuuggccuaaggcuaugaaaaagcaugauaccauagguuuugcccuc

SEQ ID NO: 4193915 - RNA, 81 nt, Human
gaagguagcuucauaacauuacagacaccuuguguuauuuuaauaugacacuuuuagcuaugaguuaaugagacugccuuu

SEQ ID NO: 4193916 - RNA, 65 nt, Human
gaagguauaucagacacucauauguaugggugcccccauacaggccaguaauuugguauguuuuc

SEQ ID NO: 4193917 - RNA, 130 nt, Human
gaaggucaccgugagggugagggcuccugcuggaacccgugucucucugggcacaagggccagggcacuccuggcccagcucagggugggcgggguguugguggagccucugccccucuuccagguacac

SEQ ID NO: 4193918 - RNA, 130 nt, Human
gaaggucauuggcagguaugugaaucuuccuggaccaggagagcauacaccucucucaucugcuagguacugucucugcccuggccaggccaauuuaaaccuucacagcuuaucagcuuggacucucuuc

SEQ ID NO: 4193919 - RNA, 111 nt, Human
gaagguccaaugcugcugcacaucuuugcaagugauucuguuuucucauguuacacacagugagagaguuagggauccuucagacucgucagucuugccaauuggucuuuc

SEQ ID NO: 4193920 - RNA, 67 nt, Human
gaaggucuggcugccuggagugagggagagagcggggugagacuccccccagggggccaggaacuuc

SEQ ID NO: 4193921 - RNA, 83 nt, Human
gaaggucugggauggugcuuuuucaaucagaagggaguagucauuuucccucucucuaaggagagggccuccucccucccauc

SEQ ID NO: 4193922 - RNA, 62 nt, Human
gaagguugaagaggaagaugacuaguggaauacuaauagauucugacccucuuuuuacuuuu

SEQ ID NO: 4193923 - RNA, 80 nt, Human
gaagguuucuuacauuuguaacucucccuuuguauauuucgaauguuugagagggggaguuauauuaaaauaaaacuuuc

SEQ ID NO: 4193924 - RNA, 80 nt, Human
gaagguuugcuuugguagcagcuauagauagcuaagaucauucuuugugaaauguauggcaugcaacuuagcauuaauuc

SEQ ID NO: 4193925 - RNA, 58 nt, Human
gaagguuuucaggagccuagucuuagaaucauagagguucuuggcuccugguuccuuc

SEQ ID NO: 4193926 - RNA, 100 nt, Human
gaaguaaaagauaaugucuuauuaucaugaguucagcaaguuucacacauugcauuuggcaauuauauugguuaacucugugugucaagacagugacuuc

SEQ ID NO: 4193927 - RNA, 72 nt, Human
gaaguacacauccuucugaacaaccuugcuucagcgcugcaagguuuuaccacuuagugaugcugugacuuc

SEQ ID NO: 4193928 - RNA, 72 nt, Human
gaaguagagucaaaacugucuagagagagaaggaagcugacccuugccucugcuaaugguuucugcugcuuc

SEQ ID NO: 4193929 - RNA, 64 nt, Human
gaaguagcauguugcugccagaauacuagcauuucuuuuggcaaacugaaguacaugucacuuc

SEQ ID NO: 4193930 - RNA, 64 nt, Human
gaagucacuaagauuuaaaguauuaguguaggaaaauacgauacacaguaaucauagagacuuu

SEQ ID NO: 4193931 - RNA, 65 nt, Human
gaagucacuauugagcauuauuugcuucacuguacagaggaaggaacugaugcucaaagaauuuc

SEQ ID NO: 4193932 - RNA, 56 nt, Human
gaagucagaggagcugucuuugugaucuucgggaagucacuuuagcucccugaguc

SEQ ID NO: 4193933 - RNA, 63 nt, Human
gaagucagcaguuuuauaugcagcuucaauguaaaacacaagguucuguaugaaauugacuuc

SEQ ID NO: 4193934 - RNA, 111 nt, Human
gaagucaggaaaucgauaaacucaauagugucugcuuguuucuaccgaaugauaaaaagaauucuggaaagaaaguaaaggcguauuucaagguuuauguuuucuuccuuc

SEQ ID NO: 4193935 - RNA, 64 nt, Human
gaagucauaaagaguagcauuucgaauacaguaaacacuguauuaugauuguuguucaugauuc

SEQ ID NO: 4193936 - RNA, 106 nt, Human
gaaguccaagaugaagguauggcaaguuucacagggccauggaggaaguaucuguucuaggcuucuccccuuggcuuguagacggguaucuucuccuugugucuuc

SEQ ID NO: 4193937 - RNA, 110 nt, Human
gaaguccucagaccucucgguaccacauuaggcccuugucagcuagucagucacacccuaguaucagcuggcucagggacuagaguuuuuauugagaggagggggucuuu

SEQ ID NO: 4193938 - RNA, 68 nt, Human
gaaguccuguccucaggaaagcagauaacaggauacugauccuaaucugaggauugagagaagacuuc

SEQ ID NO: 4193939 - RNA, 72 nt, Human
gaagucucuuggguuuaucuguagagcuucaccuaccucauccaaugguauauugauagacccagggauuuu

SEQ ID NO: 4193940 - RNA, 92 nt, Human
gaagucugagaugaaggugcaggcaagguugguuucuucugaggccucucucccuggcuugcagauggccaccuucaucucccagugucuuc

SEQ ID NO: 4193941 - RNA, 58 nt, Human
gaagucugccugccuucucugugaacccaggggguguagaaaagaaaggggagccuuc

SEQ ID NO: 4193942 - RNA, 67 nt, Human
gaagugaagauaagcugauguaaauucacuuuauuuggauuucaauccagcuuucuucuuugauuuc

SEQ ID NO: 4193943 - RNA, 74 nt, Human
gaagugacaauucuggguagggcaaggaacuggcccugaaucuggugcuuagccuugccugccuugucaucuuc

SEQ ID NO: 4193944 - RNA, 56 nt, Human
gaagugacagaagggaugggcagcuuccugucuaaaacugacccuucuaccaguuc

SEQ ID NO: 4193945 - RNA, 56 nt, Human
gaagugagcuaggggaguuuaucaugugugugauccuuggcuucucuguuuauuuc

SEQ ID NO: 4193946 - RNA, 55 nt, Human
gaagugauguuucagugucaacuaaagcugaugucugauguugugacaucacuuc

SEQ ID NO: 4193947 - RNA, 84 nt, Human
gagggccagggcucugucuucagcacacaguaggcaccuguaaauguuugcucaguugcggcgaagacaagcagucagguucuu

SEQ ID NO: 4193948 - RNA, 63 nt, Human
gagggcggcaucgcguccuugucugcugucugggcacagccuagagaggccgcggguccccuc

SEQ ID NO: 4193949 - RNA, 61 nt, Human
gagggcugagacuaaggccagaugugguauuuuaucugcauucuaccccuucucugcccuc

SEQ ID NO: 4193950 - RNA, 80 nt, Human
gagggcugcugucucuuugcaagaugaaagauguggcauuguugcugugucuucacaaagcagaagggaugaaagcucuc

SEQ ID NO: 4193951 - RNA, 96 nt, Human
gagggcuggaaaggaaagguagcgugccagcaggcaagcagggaaaauauaugcugcagucacuguuaacauucugcauguuuccuuccggucuuc

SEQ ID NO: 4193952 - RNA, 74 nt, Human
gagggcuggggcugugaggugagaacuuaccuggcauugggacugccagguacauccccaaagccacgccccuc

SEQ ID NO: 4193953 - RNA, 71 nt, Human
gagggcuggggcuuaggcuuaggcaaaaugaaguaaccaacagagccucuuugcaguaaauuccaguucuc

SEQ ID NO: 4193954 - RNA, 98 nt, Human
gagggcugugauuugcuuuaaauuucaugguacaucgugacuugcucagguugcauaguugauaagcuguaaaguuugaauuauaaucgcuuuuccuc

SEQ ID NO: 4193955 - RNA, 86 nt, Human
gagggcuguuucuaaauucaguuuauuuugauacuuuaauggcagucaaagccuggaucaaaauggaagaauuuggcugcacuuuc

SEQ ID NO: 4193956 - RNA, 68 nt, Human
gaggggagcuaacaccagagcccagguccccagcuccccacccagggcuucacugcuuggcuccaguc

SEQ ID NO: 4193957 - RNA, 59 nt, Human
gaggggcagcagaggugcgggcuuggcuugagccaggccacaaccacccugugcccagc

SEQ ID NO: 4193958 - RNA, 105 nt, Human
gaggggcagcuaggaucauggccgcagcucccagaggggagcccccauccuccaggccgucuuaccgagccugcuccccagccugcgccuuuccugacuucccuc

SEQ ID NO: 4193959 - RNA, 94 nt, Human
gaggggccgcuuuuaaauacaagccuacuccugucguuggaccagaacaaagaccuacuggccagaagcacaugagaggugagagucgcccuuc

SEQ ID NO: 4193960 - RNA, 83 nt, Human
gaggggcguccagucugcaugaggacucagagcuucucaggcagagagccaucugagccaucaugugggccauaacgugacuc

SEQ ID NO: 4193961 - RNA, 72 nt, Human
gaggggcuagaaauucuguccugaaugccauugcuuaaguauugugguuucuugauggagaaccucccccuc

SEQ ID NO: 4193962 - RNA, 67 nt, Human
gaggggcucaaagugugcagggaagguaggcccuuucccugguuccaggcuauggucaaagcccauc

SEQ ID NO: 4193963 - RNA, 63 nt, Human
gaggggcuucagagacagcaaccaggacaggccgccuugccaacuaugcugugcucugcccuc

SEQ ID NO: 4193964 - RNA, 66 nt, Human
gagggggagagguuuauuucauuaagauccauuaucuuugaccugaaaucagaacccuuaccucuc

SEQ ID NO: 4193965 - RNA, 66 nt, Human
gagggggagaugugcacacacuuucgugcaaacacacacaugcagugacuuggccaucucccuugc

SEQ ID NO: 4193966 - RNA, 68 nt, Human
gagggggcucuguccacguaggugccggcacaagcugaggacaugagugggacagaggaaccagccuu

SEQ ID NO: 4193967 - RNA, 76 nt, Human
gaggggggugcccugaugacagagcccgugucuccuccaucagacugggcucacuggggcagggaccgucucccuc

SEQ ID NO: 4193968 - RNA, 70 nt, Human
gagggguguggguggcuggaggagcugauggaauuaauacauuccuggcaguucagcccccuaacccuuc

SEQ ID NO: 4193969 - RNA, 57 nt, Human
gagggguucugggcuaggaacccggacacguagguccaacccagcuuagcgccccuc

SEQ ID NO: 4193970 - RNA, 65 nt, Human
gaggguauuacauuucauuucaugcuugacuuaaucaaaacuggggaaaugaaauguacaccuuu

SEQ ID NO: 4193971 - RNA, 58 nt, Human
gaggguccccaugcagagcucaggagaagaagcuggaaaggugcaugucgggacuuuc

SEQ ID NO: 4193972 - RNA, 85 nt, Human
gagggucguggagccugagaccuggggaggggccagugcugcuguucaaauggcuccuuuccgggucuccagcuccaugaccuuc

SEQ ID NO: 4193973 - RNA, 63 nt, Human
gagggucuggaguagaugagucauguugcaagggaauguggagaacuucuacaccagacccuu

SEQ ID NO: 4193974 - RNA, 55 nt, Human
gagggucuucugcaaaugcacacugauaacaggaccaggcagcagagagacccuc

SEQ ID NO: 4193975 - RNA, 129 nt, Human
gagggugagaagagcuccagcccaccauuaggccuuugcugccucccccauggcuggaagggcaggugcuuuguuuuugcugggugggggaagguugcggcuuuccacugggccuccucugaugccuuc

SEQ ID NO: 4193976 - RNA, 85 nt, Human
gacuugucucaguuucucaccucuucagaguccuaacauguuacguguuauacuauuuagagguacagauuauaaagacugaguc

SEQ ID NO: 4193977 - RNA, 68 nt, Human
gacuugugagguuaauuuccucaucuauaaaauaaggaugauaauaauaagauuuaccucauauaguu

SEQ ID NO: 4193978 - RNA, 63 nt, Human
gacuuguggccacgcagacccagguuccaugcccagcucugccacuguggccaugggagaguc

SEQ ID NO: 4193979 - RNA, 67 nt, Human
gacuuuaugaagagaugaccaaugggcuauagacugaauuucagacaauggucagauuucagaaguc

SEQ ID NO: 4193980 - RNA, 75 nt, Human
gacuuuauugcuccuuuauuuucucucgugugggggggucuguucagcacggucagggugggggagugguggguc

SEQ ID NO: 4193981 - RNA, 55 nt, Human
gacuuucugagucaaagaaaggauuuggguccuauccuaaaggcaacaggaaguc

SEQ ID NO: 4193982 - RNA, 55 nt, Human
gacuuucuuaggcccccuaauacuugacuuagaucugguuugggccgaggaaguu

SEQ ID NO: 4193983 - RNA, 78 nt, Human
gacuuugaaccuuaauuaguguuguccauugcccuccaaaaagccagugccagcaguguuaaugcgaguguucauauc

SEQ ID NO: 4193984 - RNA, 72 nt, Human
gacuuuggccaagggcucuuuaggcugagaagucuucaguggcgacuggcaaggagccuuagggacacaguu

SEQ ID NO: 4193985 - RNA, 92 nt, Human
gacuuuuaauccauagucacaugucagaauaagugcaugguauaugguuuauuacaucaguugacaugugaguauguaacauugaauuuguc

SEQ ID NO: 4193986 - RNA, 130 nt, Human
gacuuuucagagcuugugguacggggagacaggcaggacaggcaugugcucuaggcuacagggaugcgacaaguaguacuggcucuggaagcacuuuuccuuccuuucuucucucugccucugaagcguc

SEQ ID NO: 4193987 - RNA, 60 nt, Human
gacuuuucuugcaggcuccagguggcagugagucagccauaaagcucguucaggaaaguc

SEQ ID NO: 4193988 - RNA, 84 nt, Human
gagaaaaaauaucgaugagucacagaagguuuugaugaaagcacagauuuuauuccacuuagugacucauuugugacuuuucuu

SEQ ID NO: 4193989 - RNA, 61 nt, Human
gagaaaaagcaaaauauacucagaaaaaacauuccuuuucgugaguggguagcuuauucuu

SEQ ID NO: 4193990 - RNA, 58 nt, Human
gagaaaacuuggccgcauccaccggggcccugccuccagucggccgcugccgagucuc

SEQ ID NO: 4193991 - RNA, 71 nt, Human
gagaaaauuguggugaagcauugagaagucacuagaagcucugaacgugacuccauucuucacacuuucuc

SEQ ID NO: 4193992 - RNA, 113 nt, Human
gagaaacaugaaggacauacuuuuuagugcuguuauuggucauuuuaagcucagugugggugaaaugauaucugauaacaaauaagaaguuuguguguguccuuucagcucuc

SEQ ID NO: 4193993 - RNA, 58 nt, Human
gagaaacccaaaggcaggaagaggguuaaaggaacucuuggccacucuugguguccuc

SEQ ID NO: 4193994 - RNA, 82 nt, Human
gagaaaccccuugugcaugcauacguaugugucuucauucuccuaugugaacauacagugagcaguggacugcuuguuucuc

SEQ ID NO: 4193995 - RNA, 98 nt, Human
gagaaacugggauauagcuggugcaggcaccucguggaguggaagaacugccaccucccauccccaagguauucugccucaaugucuucccucuucuc

SEQ ID NO: 4193996 - RNA, 91 nt, Human
gagaaacuuuuucaaacuuugggccuaaguacuguugauuugaggaacggaugaauaauuuuagcucagaguugugaagacagccauucuc

SEQ ID NO: 4193997 - RNA, 110 nt, Human
gagaaagaccucugaccacacaguucugucuagucccaacagcuuacaaggaaccagaccggucccugcgguguuuguugagauaaaacaaggucaggguuuggcuucuc

SEQ ID NO: 4193998 - RNA, 57 nt, Human
gagaaagagacguaacuuuagggcuugccaagcccugagaggcaaugacucuuacuc

SEQ ID NO: 4193999 - RNA, 62 nt, Human
gagaaagagacuauggugucuaugaauaucacucacuuucagggauccuauagcuuauuuuc

SEQ ID NO: 4194000 - RNA, 58 nt, Human
gagaaagcccaggagcagcacuguugagaggccagcucaggagucccugugcucucuc

SEQ ID NO: 4194001 - RNA, 57 nt, Human
gagaaagcuucuuucccacaggcucccagcaagggugugaaagcaagucuaguucuc

SEQ ID NO: 4194002 - RNA, 128 nt, Human
gagaaaggaagaaguugaugugguagaaauuggggagaugaauugauguuggacagaugaccaauaggguuuguuacaagguuuauucagaauauuugacauuuuuuaauauuuauaaauuccagcuu

SEQ ID NO: 4194003 - RNA, 65 nt, Human
gagaaaggaaugguguccaaccucugccagucccaggaguggagcaggucggcaccauuugucuc

SEQ ID NO: 4194004 - RNA, 85 nt, Human
gagaaaggaguuugaauuuuauuccauacuuggaaauuauuugagacguuaagcauggaagugaaauaaucugacuuacauuuuc

SEQ ID NO: 4194005 - RNA, 80 nt, Human
gagaaauagacaaauucacaauuauguugggagacuuugcuucagagucccacaauuauguugggaaacacucuuuucuc

SEQ ID NO: 4194006 - RNA, 94 nt, Human
gagaaauauggaauuauggacuuugagagcugggaaauguuagcuucucuagucaagaguuagcuaauagacagcauuugguccauuauaucuc

SEQ ID NO: 4194007 - RNA, 68 nt, Human
gagaaaucaugaggccaagaaaagcuggguggcuuacucgaagucaucaguuuggucaaugauggguc

SEQ ID NO: 4194008 - RNA, 89 nt, Human
gagaaaugguuugagcaaaauaaauucugacaaacccaaaagaucacugguauuugucuuaaaucuuguuacugugcaaaucuuuuuuc

SEQ ID NO: 4194009 - RNA, 62 nt, Human
gagaaauuuugaguggcuuucuuaguagagauaauaacaggcuucccacucaguaauuucuc

SEQ ID NO: 4194010 - RNA, 75 nt, Human
gagaacuguagugcaagguuuugccaacuuuuugaccagaauccucggugaguaauaaauuuugcacugcagcuc

SEQ ID NO: 4194011 - RNA, 78 nt, Human
gagaacuguucuuuugcuucuaauuaaaacagucagggguauuacugauuaaagguggggaagcagagaacuguuuuc

SEQ ID NO: 4194012 - RNA, 108 nt, Human
gagaagaaaauucauagagaaggggaaagaggcaggaaacauggauuuauuucagaaauuuuguagguuucugcuguccuccuucuccccugcuaccuacuucugcuc

SEQ ID NO: 4194013 - RNA, 117 nt, Human
gagaagacagugauggacaugcagugucuccagccuugaugacucaggaggaggagauggaacagcuccccucaaaagcucucaggggaggucacagcuguguccucaucuggucuc

SEQ ID NO: 4194014 - RNA, 81 nt, Human
gagaagacucucaauggcuucuuuuugguauaaugcucaaguauacugcuaaugggaaugcuaaugggcagagccuuucuc

SEQ ID NO: 4194015 - RNA, 64 nt, Human
gagaagagggcucgauuuggcaaaaugaccagcucucgucauguuccagauacgccuuuuccuc

SEQ ID NO: 4194016 - RNA, 84 nt, Human
gagaagaguccacuggcagugagucccggagaggcccgccugcagcagcguggcaucuuccgcacccacuuccugcucuuucuc

SEQ ID NO: 4194017 - RNA, 66 nt, Human
gagaagaugauuucagcuuuggauaugucaaguuggugcuagauauucaaguggaauuauucucuu

SEQ ID NO: 4194018 - RNA, 83 nt, Human
gagaagcaagggagagcacaguccucacauccaacuaaagguucccuaaggugcagggcuguguuugcacccucugccugcuc

SEQ ID NO: 4194019 - RNA, 75 nt, Human
gagaagcacuggcuccucaguauuccacuuuucuucaaggaaggacacugcugaggaucagaugacaugcagcuc

SEQ ID NO: 4194020 - RNA, 78 nt, Human
gaguagaagauugccagauaggcaugaaaaguaggagaauaauaaaguacuaagcacguguauuuggcagaacuacuu

SEQ ID NO: 4194021 - RNA, 74 nt, Human
gaguagaaucugggaaaaggugacucauuugaccugaacugucuccacugauaccuuucccugggagacugcuc

SEQ ID NO: 4194022 - RNA, 79 nt, Human
gaguagaccaaguucacaucccagaaagagcauuccugugauggaggggcaacugcauugugaauuaugaucaguauuc

SEQ ID NO: 4194023 - RNA, 96 nt, Human
gaguagaugaaaucagauuuagaguggggcuuggaauucucugcucaaguccacagaaaucugaaagcccuaguuuguaaucucuaauaucugguc

SEQ ID NO: 4194024 - RNA, 59 nt, Human
gaguagcagaggccccuuucccaggaggauaaccugggcuuauggagggcuuuguacuu

SEQ ID NO: 4194025 - RNA, 81 nt, Human
gaguagcaugcagugaaauugauauccaguuuuuuaaaacuuucauaugaauugguaugaugaucacuagcagauuuauuc

SEQ ID NO: 4194026 - RNA, 72 nt, Human
gaguaggaauuccagaguauugguagcuauaaccacuuuggguucccugccauugcuucuggugccucauuu

SEQ ID NO: 4194027 - RNA, 84 nt, Human
gaguauacgauggccaggcaggaggcaugaagcuggcaaagccacuuuggcaccuucugccuauaagacagccucuguuuauuu

SEQ ID NO: 4194028 - RNA, 66 nt, Human
gaccgcaggguggaagcuguagaguggucagcauuuggaugccacauacugcaaucaccccugguu

SEQ ID NO: 4194029 - RNA, 74 nt, Human
gaccgcauucccacuuggcaggauguugcuggaggugaauggcugccauccuucuaagagggacguaugcuguc

SEQ ID NO: 4194030 - RNA, 81 nt, Human
gaccgcuguaaauaaagucaucuuuacaucuuugccagaacccauuugucaguuguauguggcuguaugagacagugaguc

SEQ ID NO: 4194031 - RNA, 66 nt, Human
gaccggcuuucuccuugccuuagucuucuaugccaauaaagaagaaaggcagggaugaggauuguu

SEQ ID NO: 4194032 - RNA, 57 nt, Human
gaccuacauggaugcacagaaguggcuuagccccuauucucaguguccauguuaguu

SEQ ID NO: 4194033 - RNA, 66 nt, Human
gaccuacuagcaaaaagcaggguugauauauuuuucuguugguguguuaaauguuuugcuaguguc

SEQ ID NO: 4194034 - RNA, 61 nt, Human
gaccuagauuugcaugccuacaccacuaccuaguaguggugcccuuugauaaauuuauuuc

SEQ ID NO: 4194035 - RNA, 95 nt, Human
gaccuauagaacaagccuguguuguuuucagcuauuacauuuguggucauuaguuauaguagcaacaagaaacaaauacacuggcuuuucagguc

SEQ ID NO: 4194036 - RNA, 81 nt, Human
gaccucagagccuggcauccucccucaagcugaaggccaauuugcccuucagugaccuggaugccuguccaggcucugguc

SEQ ID NO: 4194037 - RNA, 63 nt, Human
gaccucaggcuucuguaauuaaggaccaccaaaaaccaucuccauuuuguuuagucugagguc

SEQ ID NO: 4194038 - RNA, 67 nt, Human
gaccucaucugaacauaugcaaagacuuuauuuccaaauaagacuacaugcguagguucgagggguu

SEQ ID NO: 4194039 - RNA, 65 nt, Human
gaccuccugcucaauuccggcacgcuggcccucacucagacggcacugcgccugauugguagguc

SEQ ID NO: 4194040 - RNA, 85 nt, Human
gaccugacauccucccaagguugggcccugcucugaguugcuguggggacacaacuccugagguccccugugguaguaugugguu

SEQ ID NO: 4194041 - RNA, 69 nt, Human
gaccugacauguuguuaauuguggaccuccauuuagaguaaaucuacaaagaagaauuaaugucugguu

SEQ ID NO: 4194042 - RNA, 81 nt, Human
gaccugaugacgggguguaccacucuacuaaggguucccaacaugaaggugagggggccccugggaauucugugauugguc

SEQ ID NO: 4194043 - RNA, 129 nt, Human
gaccugcaggugugggaaugugugauccagugcuggaaggagccgugcagcaaggcuuccuagguucucagcacugugcuccuuccuuagcacccggcugcucauauuacuccacgacuccacacccuc

SEQ ID NO: 4194044 - RNA, 60 nt, Human
gaccugccacaggugcaagaaguugcagucaaaugauuaccaacaugcaccugugugguc

SEQ ID NO: 4194045 - RNA, 106 nt, Human
gaccugccaguuguccaguguuaaguuaucuguguuguuaucagaaucaaacauuaaaaacauacagccuauucuuaccauuguuuuggagaacugagaaaggguc

SEQ ID NO: 4194046 - RNA, 74 nt, Human
gaccugccucgauuuuccugucauuccugugugccagcaucacacacagugauugggguaucugcagcuuuguc

SEQ ID NO: 4194047 - RNA, 89 nt, Human
gaccugcucuaagcugguggagaguaagaaagcugggacuucauuauucaagguuuauucaguuuagaagggaaaauaauuagcaaguc

SEQ ID NO: 4194048 - RNA, 76 nt, Human
gaccugcugggcaauaugcugggccuggaccucugaaaggacaacacccagaccguggcccgugcccacacagguc

SEQ ID NO: 4194049 - RNA, 77 nt, Human
gaccugggaugcagaggcagggcuggggagcaggcucugucuucuuggcugcaagucucugugugacaucccaaguc

SEQ ID NO: 4194050 - RNA, 57 nt, Human
gaccugguuucaggaacauaaucuauuugucauaauuugaguuucugaaaccauguc

SEQ ID NO: 4194051 - RNA, 69 nt, Human
gaccuugaagaugguagcaauuuccucucugacucaugcauaggaggagauuccaacauuuucucuguc

SEQ ID NO: 4194052 - RNA, 83 nt, Human
gaccuugaaugagauuaauaauaucgcuccuuuuuuugagaagauuaaaaucucaucagagcgauaaauacuuauaaaggguu

SEQ ID NO: 4194053 - RNA, 79 nt, Human
gaccuugaaugccuugcagacauuccagagcuuuuccccuugggugauggggagacguggaaggucuagaggucagguc

SEQ ID NO: 4194054 - RNA, 78 nt, Human
gaccuugaauuuguacugaccaauuauuugaaagccuuuguuaaaaagcaucagauuuuuagucauuuaagugugguu

SEQ ID NO: 4194055 - RNA, 78 nt, Human
gaccuugagaaggcuaguguugaugggaccugguagugauauucagugcagguaagagaggcuggcuuccacagaguc

SEQ ID NO: 4194056 - RNA, 77 nt, Human
gaccuugauuuucucuuaugggauagagaggggugggaauggcacacccaucccuuccucauaggcagaaggggguc

SEQ ID NO: 4194057 - RNA, 99 nt, Human
gaccuuuagucagugaaaguagcagguggucuguugcugcugccauccccaggcggaauacccuuccugcaguagacaacagccgaugucaccaagguc

SEQ ID NO: 4194058 - RNA, 84 nt, Human
gaccuuuugauuacagugcaaguaucuuaguuccauugccuuccugaaagaucaauaacuuugauauuuugcgguaagaagguc

SEQ ID NO: 4194059 - RNA, 80 nt, Human
gacgaaagaaagauuuuaucuuugugugcaguauuuuaucuugaaaauaugcccaaaugaugagauuauauacuuuuguu

SEQ ID NO: 4194060 - RNA, 70 nt, Human
gacgaugcgacagaguggggacuucucaggcuggacagggcccuagaagccagucgcucucccgcagauc

SEQ ID NO: 4194061 - RNA, 65 nt, Human
gacgauguagacaguuguguagguagcaauggucuggcggaccuagaacacaaccuauauuaguu

SEQ ID NO: 4194062 - RNA, 69 nt, Human
gacgcagggaggaugggcuguuuugcccugaacccuaaggugcaggguaggggcuccuucucccuguuc

SEQ ID NO: 4194063 - RNA, 71 nt, Human
gacgcaucagcuggcuauccuauugcauacuuucauuggcacugcaaucagguaccauuugauucuagcuc

SEQ ID NO: 4194064 - RNA, 68 nt, Human
gacgcaucaggaggcgaggagcuguggacugagaugaaaacacaggacuguuugcaagccuauguguc

SEQ ID NO: 4194065 - RNA, 110 nt, Human
gacgcaugaaaugaugggcauguuaguccuuuuguuauugugagaguccugcauaguuuguucugugacucacuuaauuuacaagucccuagccccacauuauugguauc

SEQ ID NO: 4194066 - RNA, 71 nt, Human
gacgccagcagaguugguuucugguaaguccucucuccuuggcuugcagaugaccacauucuugcuguguc

SEQ ID NO: 4194067 - RNA, 76 nt, Human
gacgcuuccaaaaccugcucuguaaggucagaaaaggaauuugucacuugacccucacagggcagucaggaauguc

SEQ ID NO: 4194068 - RNA, 96 nt, Human
gacgcuucuccccuccccuccuagaggaaccccagggcacgccggaaugcgugugguccuucaggguccauuagggucaaaagugggaggggcguu

SEQ ID NO: 4194069 - RNA, 68 nt, Human
gacggaaaguguuuacuuaaagucauggccaaauggcuagggagaguuaagauaaaucauaagcuguc

SEQ ID NO: 4194070 - RNA, 62 nt, Human
gacggacucuuggcaaucuauacugucuuucagccaaaguguagcuuuauacaagaucuguu

SEQ ID NO: 4194071 - RNA, 74 nt, Human
gacggcgcugggucggccuggcgcgcccucccgcgcccacgggcgcuaggcuaggucugugcgcagccgcuguc

SEQ ID NO: 4194072 - RNA, 100 nt, Human
gacgguaaagcuggaucacuaagcaugagccagugcaacacagugcaagccucuaguuugacuguuaagacuuggcucugccguggccuagcuguucauc

SEQ ID NO: 4194073 - RNA, 70 nt, Human
gacguagaacucacagauguucuccuuuagguuucccuauugauuccuugagagaagucugugccuuguc

SEQ ID NO: 4194074 - RNA, 96 nt, Human
gacgucggggcuguucaggcuucugcuguauuaacacuugucuucagaaagaaagcaguggaguuuggugcagugagcacaagcagccuacuaguc

SEQ ID NO: 4194075 - RNA, 73 nt, Human
gacgucucuggaguguguguauucagcuuucucauucucuuugaaaucuagcuauuugcacuccaaagaaguu

SEQ ID NO: 4194076 - RNA, 61 nt, Human
gacgugcucauauauuccucacauagcuguuauuaacuagcugugugaauuagggcauguu

SEQ ID NO: 4194077 - RNA, 60 nt, Human
gacguggcucugucagguugcgccugcaagaggcugaccaaggccugugcagagcccguc

SEQ ID NO: 4194078 - RNA, 66 nt, Human
gacgugguccuuggcuuucuggagcuucuauucaaguagaaggagacagacagucaagaucauuuc

SEQ ID NO: 4194079 - RNA, 78 nt, Human
gacguuuaguaucacuuagccucauccacuggcugccaggaugacaguuaauggaugcggcugcgugaccgugauguc

SEQ ID NO: 4194080 - RNA, 85 nt, Human
gacguuuuucaucacuucacacuuuugcaguguuugcuacaaucaagacacugugcuuagaugcugaacgugaugcaaaggaguu

SEQ ID NO: 4194081 - RNA, 86 nt, Human
gacuaaugauguugaacaucuuuucaugugcauguugaguacccguguguuuucuuuggagagaugucuguucaagguuauuuauc

SEQ ID NO: 4194082 - RNA, 100 nt, Human
gacuacagccccggaccuugugagagcucagcugcccugggcccuauccucuccuggcccaggaaccuaccagcucgaguggcucccguggccacgaguc

SEQ ID NO: 4194083 - RNA, 62 nt, Human
gacuacccagggcaaaugucuucccuucccuuccugaagccacaggaaagcacccuggaguc

SEQ ID NO: 4194084 - RNA, 68 nt, Human
gacuacuucccagaacaauguaggcuuuacacccaagagacaagccucaggacauucaggaagaaguc

SEQ ID NO: 4194085 - RNA, 87 nt, Human
gacuagaguuucuugagagauauacuacugaaagaagcuaucuguauuaaaauucaguauguguaaacuacuuuaaugaaccugguu

SEQ ID NO: 4194086 - RNA, 79 nt, Human
gacuaggcucaaugaaaggaagaacucuggcaggccaguaaaagacaucuaccuuucauucaaacagagcccacaaguc

SEQ ID NO: 4194087 - RNA, 60 nt, Human
gacuagucagucccuacuaaaguauuuccaggacuuuuggaaacuuaagggggagauguc

SEQ ID NO: 4194088 - RNA, 103 nt, Human
gacuauauugggggauuagagguggguucugaagauguuguggaaugcuguuuccccaugguuuccaggauagcuuucaggaauccuuuucuguagaauaguc

SEQ ID NO: 4194089 - RNA, 55 nt, Human
gacuaucauuaaauauuuuaauuugcuuucgcuaggaaaucaguuaaugaugguu

SEQ ID NO: 4194090 - RNA, 90 nt, Human
gacuauccaguuggcuaguaggugaguagugcugaagauacuauucugggaggcaaucauuuaucucugguuauugguuuaagaaugguc

SEQ ID NO: 4194091 - RNA, 84 nt, Human
gacuaugggcaaaacuauauacauggaaagcuauuaucauuauuauuauucuauguggauauagaacugcuuacagacaugguu

SEQ ID NO: 4194092 - RNA, 96 nt, Human
gacuauuagguugaugcaaaaguaauugcaauuuuaccuuucuuuacuuuuaaugggaaaaccgcaauuacuuuugcaccaaccuaauauuaaguc

SEQ ID NO: 4194093 - RNA, 64 nt, Human
gaucuuuuccuuucugugucuaauaggauauuucuacaaacaagaugcuggauggaaaaugauc

SEQ ID NO: 4194094 - RNA, 93 nt, Human
gaugaaaacaguaaucuugccagucuccaaaucagucugaaugguaucauuuaccuugaugaggggaucaagguagcggaugcugugagcauc

SEQ ID NO: 4194095 - RNA, 59 nt, Human
gaugaaaugagauagauaaucaggcagguccgauccauugccuggugcauucauucauu

SEQ ID NO: 4194096 - RNA, 66 nt, Human
gaugaaggaagccuugcucuugaaaaaguuguauuugguguaacccaggagcagguuuccgaaguc

SEQ ID NO: 4194097 - RNA, 57 nt, Human
gaugaaggccuuguccugaucccuuggaaacacagagcaucacagacgugccucauc

SEQ ID NO: 4194098 - RNA, 79 nt, Human
gaugaauuuauagucauucugcagaaauauaaaggaacuagaucuccuaauggccuuagugaugauuaauacguucauc

SEQ ID NO: 4194099 - RNA, 101 nt, Human
gaugacaaauacaaggaaggcaaaguauuaaguauuaaguuuggcuauaaaagcuugguauagcuaaaugcuaaaugcuaucugcccuugguguuugcguu

SEQ ID NO: 4194100 - RNA, 72 nt, Human
gaugacacugcucuuaugaccaaaggaaugugagcucguauauucuuuuagaauuuccuaagguagguuauu

SEQ ID NO: 4194101 - RNA, 65 nt, Human
gaugacauggcuagcacugugacccugaaugaagccagcauaccuguccaguguagcuggucauu

SEQ ID NO: 4194102 - RNA, 82 nt, Human
gaugacauuauguguguuucagaagccagguguaaagagcacuuuuccauacauuuuauaucugaguuaccaaugccucauc

SEQ ID NO: 4194103 - RNA, 63 nt, Human
gaugaccgugguagccaaguaaguguccaucagcagaauacaaggcaaauccaugaugucauu

SEQ ID NO: 4194104 - RNA, 100 nt, Human
gaugaccugcuuaaaggcgauaaggcaguguuuuaaggaugaccacuaaaucuuuguuuugccaacacuacuuauaaaauguuuuacaaaugguuuaguc

SEQ ID NO: 4194105 - RNA, 62 nt, Human
gaugacucuuuguggaugccgcagugggcaacagcucuuucugugacuugccaaaggucauu

SEQ ID NO: 4194106 - RNA, 129 nt, Human
gaugagaaucuccugaggguguuuguuaaauauuacaaguuucuggcuucaucccagacccauugaauaagaagcucuaggaggaccaggaaccuguguuuuuaauaagaggcccugauaauuccuauc

SEQ ID NO: 4194107 - RNA, 58 nt, Human
gaugagaauguuuaucaaaugccuaccaugcaccaggcaauugauaaacaauuucauu

SEQ ID NO: 4194108 - RNA, 61 nt, Human
gaugagacagaauagcccaaggucugauccaagggacaucuggugcucuuuugucuucauu

SEQ ID NO: 4194109 - RNA, 61 nt, Human
gaugagagacgaggcagccauggagaggagacugcagcugccuggcuuccugacucucauc

SEQ ID NO: 4194110 - RNA, 56 nt, Human
gaugagauaguuaaauagcauguuuauuuaauaagcauguacaaugagugucucuc

SEQ ID NO: 4194111 - RNA, 113 nt, Human
gaugagcuacuuacaguccagguugugcugucacauguccggugucuuuugguacucugaguuuguauaaggaagcuguuagacaugcauagugcagccuggcauggcuuauc

SEQ ID NO: 4194112 - RNA, 78 nt, Human
gaugagcuggaagugagaaguuuccucagaaagggcugaaaggguuggcugagaauuuuuuuucauuucauccucauc

SEQ ID NO: 4194113 - RNA, 78 nt, Human
gaugaggacugggggggucugggaugggugccggggacaugcaucuggagccagcccaggccccucuggcaauucguu

SEQ ID NO: 4194114 - RNA, 75 nt, Human
gaugaggagguucacuguuaugcguaccacugucacucaacacuugauuuacaaugcagugaccuccuuuaaauc

SEQ ID NO: 4194115 - RNA, 56 nt, Human
gaggggccucagccuccuggucaugaaagaguccuggguagaggcagagaccccuc

SEQ ID NO: 4194116 - RNA, 72 nt, Human
gaggggccugcccucagcugccaugcuccccagggacaggcggcggacaguggcagcugagugcacccccuc

SEQ ID NO: 4194117 - RNA, 58 nt, Human
gaggggccuggcgaggacauguagaaagacugcguuuuccuuuucaaucgggcccuuu

SEQ ID NO: 4194118 - RNA, 80 nt, Human
gaggggcggagguaggggccagaaagacuuagaagaugucccauauguuuaaugucuuuggccuuuaauucugauuucuc

SEQ ID NO: 4194119 - RNA, 80 nt, Human
gaggggcgugaaaaugaacacaucagaagccaguguugcuugggcgcaguuucagagguguucauuuucauuggcucuuu

SEQ ID NO: 4194120 - RNA, 61 nt, Human
gaggggcuagcuaggcugggccaggaucccuguauaaauggcccaggagcugugccccauc

SEQ ID NO: 4194121 - RNA, 76 nt, Human
gaggggcugggccacuccagaugcccacuugaucaucuuugcuggugcaguauauggagggcucacccacaagcuc

SEQ ID NO: 4194122 - RNA, 65 nt, Human
gaggggcuguggagcucucugguccaaccauuuccaguuauagauagagagaccuaggccuaguc

SEQ ID NO: 4194123 - RNA, 81 nt, Human
gagggggagaggggaacuuguugcuugcaacccauuggccaucaauggcugagugaccagaagucccccuccuguacccuc

SEQ ID NO: 4194124 - RNA, 55 nt, Human
gaggggggcugucagggcaagcccagggaucacugaugcugcccuagcuccccuc

SEQ ID NO: 4194125 - RNA, 65 nt, Human
gagggggugcauuguuuauuugaacaaauaaaacaauacuuugaguuuaaauauauuucccccuu

SEQ ID NO: 4194126 - RNA, 64 nt, Human
gaggggguggucacgcuuuccagggucuuuucuguuucugacaggcugugauuccaccacucuc

SEQ ID NO: 4194127 - RNA, 55 nt, Human
gagggguaccuauugugggggcucaggaauacuagcucuggccuacuguucccuc

SEQ ID NO: 4194128 - RNA, 74 nt, Human
gagggguccauacggcgcuguucuggauucccguuguaacuuaaagggaaacuuucacaauguccggagcccuu

SEQ ID NO: 4194129 - RNA, 66 nt, Human
gaggggucucagggcugagggcagugggcagauauggccccugcaucccagucuuagcaaauccuc

SEQ ID NO: 4194130 - RNA, 99 nt, Human
gaggggugagccucaggcagaauggagggcgcuuagauggagggggcagugggcucuccgcauugguggagcgcccucggugugccgggcucagcucuu

SEQ ID NO: 4194131 - RNA, 128 nt, Human
gagggguggggccggccucaacgcagcagugugcuagcaagaacuggggacauuuuuacccugccaucccaucaucuguucuggcuacacaaaaugagugugaauuaugggggccugcugagccuuuc

SEQ ID NO: 4194132 - RNA, 80 nt, Human
gaggggugguucugagaugaggaggaaaaagcuauuaguuggcuuuuugcaagaguuucucaucccagacuuagcuccuu

SEQ ID NO: 4194133 - RNA, 58 nt, Human
gaggguagguacauuauuagaugcauguugaauucaacugaauuaugugcuuaccuuu

SEQ ID NO: 4194134 - RNA, 93 nt, Human
gaggguauaaaggacuucaguuucuaaagauguuccuaaaugcuccguggcaucugcagcaggaugucgggagcuggaauccacugugcucuc

SEQ ID NO: 4194135 - RNA, 66 nt, Human
gaggguauccuauaguccuuagaggggccuuagagacucuuucuuauuggauaaaaggaaaccuuu

SEQ ID NO: 4194136 - RNA, 71 nt, Human
gaggguccuggcuguggucugauaggauuuacaugggagaugauaaaccugcaacuauagccaccauucuc

SEQ ID NO: 4194137 - RNA, 55 nt, Human
gagggucuccugccccuggcucugccuugagugagugugggugagggaggcccuc

SEQ ID NO: 4194138 - RNA, 69 nt, Human
gagggucugagaagucauuugaccaccuagccugaaaccagcccuaggcucaggugacuccaagcucuu

SEQ ID NO: 4194139 - RNA, 67 nt, Human
gagggugacgguggggguagcaaugguguggaggacauaacacugcuaaaucuccaucgauuacauc

SEQ ID NO: 4194140 - RNA, 77 nt, Human
gagggugagaccagauuucaaaguuuuccuucuucuagaacuuagaagaaggaaguguggacaucacuaucaucauc

SEQ ID NO: 4194141 - RNA, 77 nt, Human
gagggugccagcaugauuggugucuggugagggcucucuuccuggcuugcuaguagccgccuucuugcuguauccuc

SEQ ID NO: 4194142 - RNA, 130 nt, Human
gagggugcccccgagacagccgagcguuuccagagguagccgagugcaaucgggucggcgagggauccgagacugggcucggcugggcuuagagacgcccgagcgcuuucggaaauggccgaacacucuc

SEQ ID NO: 4194143 - RNA, 64 nt, Human
gagggugcugucaggaagcugggcauccagggcugcaccuggaaaccaagcuggcagcggcuuu

SEQ ID NO: 4194144 - RNA, 77 nt, Human
gaggguggagguccaagaucaagggcagguugguuucucuugaggcuucucuccuuggcuugcagacggccacauuc

SEQ ID NO: 4194145 - RNA, 58 nt, Human
gaggguggcauacaacauagaggcuugaaccaaaggccucugcaauguugucacacuc

SEQ ID NO: 4194146 - RNA, 119 nt, Human
gaggguucugaugguuuauucauuccuguaauacauauucauugaacaccuacuacaugccaggccccgugcuaggugccaggaauacuacaggaguagaaaaaacagacacuacucuu

SEQ ID NO: 4194147 - RNA, 122 nt, Human
gaggguuucuucaagaauacuucaguugaguggaaucuugacccucaaauaguugccuagguuagcaggaccugaggcaaucccuaggguaaggucuggucagauaaguuaaagccgccuuc

SEQ ID NO: 4194148 - RNA, 86 nt, Human
gagguaaauaugugucuuguaaaagcuuugugugaucagaauauuuugguaauuauaaaauguuuuugaugauacacauuuaacuc

SEQ ID NO: 4194149 - RNA, 78 nt, Human
gagguaacuugcauuuaaauauugaauauucaaucaauaauuaaagugauguuuaauaaggaaaugcaagacagccuu

SEQ ID NO: 4194150 - RNA, 96 nt, Human
gagguaaggaacuugccagaaguuaugcagcugaggguaguggagccaggauuugagcccaggcagccucacugcaguccuugaguuccuaaccuc

SEQ ID NO: 4194151 - RNA, 129 nt, Human
gagguaagucuucuccugguguuuagucaggaugccuuagaguguguuguguuguauuaaaugauggaugguguaacaaauacccuugaaguucucacuggcuuaacauaaagaguuaguuucuuccuu

SEQ ID NO: 4194152 - RNA, 90 nt, Human
gagguacagccaggacagggcagcucgcuccgagauuuuuggcucucgaaggccuugagcgcugugguucugcagaacgcugucugccuc

SEQ ID NO: 4194153 - RNA, 113 nt, Human
gagguacuaacgcacuacauuuuugaauuacuauugauugacaugucucuguucaauguaaacagcuuaaacagagagugcaguuauagaaauggaauuugcaugagaaccuu

SEQ ID NO: 4194154 - RNA, 98 nt, Human
gagguagacucucgcucugucaccaggcuagagugcaguggcgcagucgcagcucacugcaaccucugccucccagguucaagugauucuucugccuc

SEQ ID NO: 4194155 - RNA, 65 nt, Human
gagguagauauacuuauuccauuuuuacugaugaugaauaugaauggaccaaaguaauuugccuu

SEQ ID NO: 4194156 - RNA, 97 nt, Human
gagguaggaaaaucacuugagcccagaguucaaggcugcagugaguuugaucauaccauugcacuucagccugggugacagagugagauccugucuc

SEQ ID NO: 4194157 - RNA, 70 nt, Human
gagguaggccgaggaagcugagucagugauucuuuuaaaucucaaauucccuuuuccuccugcuugccuu

SEQ ID NO: 4194158 - RNA, 57 nt, Human
gagguagguguaggaggccugcagguacaaauugaccaggcuguugacggcugccuc

SEQ ID NO: 4194159 - RNA, 73 nt, Human
gagguaguccuggcugcaguuuuugcagaagaaugaauaacauuuucuggaaacccucagccagugucuccuu

SEQ ID NO: 4194160 - RNA, 94 nt, Human
gagguagugauuuuuguaucaggaagccagucuaauggagauggggcuccauggaguagauuauccugaagcuggaaggacuggagaaaaccuu

SEQ ID NO: 4194161 - RNA, 96 nt, Human
gagguaugcucuccuccagcucccaggauguuggcggcagguagcucugagcugaggccuccccugcaauuguccuuggcuaaggagggccaccuu

SEQ ID NO: 4194162 - RNA, 61 nt, Human
gagguauggcauaaaucacaggggagggcauaaacucagcuucaugagaaugccaggccuc

SEQ ID NO: 4194163 - RNA, 61 nt, Human
gagguauguccugagaguuugacugcagugggaauugugacaguaacuugggauggaccuu

SEQ ID NO: 4194164 - RNA, 61 nt, Human
gagguauguguuguuuuuggauuauccaucaauguggauaaucaagagcugacuauauuuu

SEQ ID NO: 4194165 - RNA, 59 nt, Human
gagcuuccuggaugaagcccagcauaaaugucuugugcuuauccccauucuggaggcuu

SEQ ID NO: 4194166 - RNA, 64 nt, Human
gagcuucucaagagaaggacaucgaaaauucucacuuggucuauguagucucuuugggaaacuc

SEQ ID NO: 4194167 - RNA, 58 nt, Human
gagcuucugccauagagggacuuugcacccgcugcccucugucaggcugcagaugcuc

SEQ ID NO: 4194168 - RNA, 66 nt, Human
gagcuugagugcccaagcaagaggaaauuaccaauaauuuuaauaguauguggcaucucugagcuc

SEQ ID NO: 4194169 - RNA, 76 nt, Human
gagcuuggagaucucuguaaaccauaaauugaaggguauggucucuuuguaggguauagcaggagaacccaggcuc

SEQ ID NO: 4194170 - RNA, 60 nt, Human
gagcuuggccucuugaacgugggccacaauaauucagcccacaucauuucaggcagguuc

SEQ ID NO: 4194171 - RNA, 56 nt, Human
gagcuuggugcugccuguugucugccugccccugaccugaaggacaugcccagcuc

SEQ ID NO: 4194172 - RNA, 56 nt, Human
gagcuuuccacagaggcugaacauggcuucagaagccacagccucugggaaaacuc

SEQ ID NO: 4194173 - RNA, 73 nt, Human
gagcuuuggguuagauuauauuuaaauauuguuuucaacaguauaccauugugacuuugaugccccaaagauc

SEQ ID NO: 4194174 - RNA, 58 nt, Human
gagcuuuguaaaaaacuugcacaccauggucuauguggcaagucacuguguagagcuc

SEQ ID NO: 4194175 - RNA, 57 nt, Human
gagcuuuguagcaggaaggaaggggaaauacugcaaaauccauuaagcucagagcuc

SEQ ID NO: 4194176 - RNA, 59 nt, Human
gagcuuuucccgucuuucucgugcugcguucaagcacgaugcagggacggcagggguuu

SEQ ID NO: 4194177 - RNA, 102 nt, Human
gaggaaaaacaaucugaaacaugaguauauccagaaaaucaguucauuuauguaacccaagaugauuggcagauauuuucuggcuuucaugagucaauccuc

SEQ ID NO: 4194178 - RNA, 101 nt, Human
gaggaaaacauguuuucccuccauuuccuucacaugaggauuuccuugaguuuaaaauccuguguugauagagaugguuuauuuagaagagcguuggccuc

SEQ ID NO: 4194179 - RNA, 62 nt, Human
gaggaaacugaagcccaugcuucacgcucuaagcacgaguaacagagcauggguucagacuc

SEQ ID NO: 4194180 - RNA, 74 nt, Human
gaggaaagagucaaaucugaagaucgugaaauuauguucucuuuucuuccguuucaguauauuugccuucccuc

SEQ ID NO: 4194181 - RNA, 66 nt, Human
gaggaaagcaauggcugagaacacugaaagaaagaagcaauguuaggcagcaaugcuuagauccuu

SEQ ID NO: 4194182 - RNA, 57 nt, Human
gaggaacagagggcaaggccagggcucaugugcugacaccuuuuuccuucuuuccuc

SEQ ID NO: 4194183 - RNA, 129 nt, Human
gaggaacaugaggcauguugucagugaguaagaaguggcagucauuaucgcugagucagaauugauggcucuuguucguaccauggcuuagccauguuugaauuauuuguuuacuuguuucuuuccucc

SEQ ID NO: 4194184 - RNA, 63 nt, Human
gaggaaccaaucugugauauucagaaugugggaugaucuauaggauaaauggucugguuucuc

SEQ ID NO: 4194185 - RNA, 72 nt, Human
gaggaacccagcugggguugccgacugaaacaucuacacuuggccucuccaugaagcugcuuggacuuccuc

SEQ ID NO: 4194186 - RNA, 74 nt, Human
gaggaacugccagacucuuuuccaaagcacugcauuuuacauuuccaccagcaguguaugaguuucaguucuuc

SEQ ID NO: 4194187 - RNA, 100 nt, Human
gaggaagaacuuguuuuucuugcuuaagaggaagaacuuguuucucuugcuuaagagaaacaacuuguuucucuugcuuaagagaaacaacuuguuucuc

SEQ ID NO: 4194188 - RNA, 72 nt, Human
gaggaagaaguaacgaauaaacaagugauaaauaccuugguuuuuucauguuauuuuuguuguucuuuacuc

SEQ ID NO: 4194189 - RNA, 63 nt, Human
gaggaagcugcguggcauuucagagauacuuauuuuaaaacugcugguggccaugucuucuuu

SEQ ID NO: 4194190 - RNA, 55 nt, Human
gaggaaggcagccacgucaggcuggcuggccagcuccuugcagguugccuugguc

SEQ ID NO: 4194191 - RNA, 59 nt, Human
gaggaaggcuaaggggcuuagagucuggcuaaggauuucugucccucuuugcuucccuc

SEQ ID NO: 4194192 - RNA, 66 nt, Human
gaggaaggggccuaucacuuugaauuagaauaaaaguaaauaagcuggugauguggucccucacuc

SEQ ID NO: 4194193 - RNA, 74 nt, Human
gaggaagggucagggucuguaggggaaggucuggauuuggguccuggcucucuacaaaccagacauaaaaccuu

SEQ ID NO: 4194194 - RNA, 77 nt, Human
gaggaaguuauccugaagguuaacugucaguuauccugacuuucagggcuaaugagaucauaucuucugagcuccuc

SEQ ID NO: 4194195 - RNA, 61 nt, Human
gaggaaucacaucucauucaacagccuguuacaggggucugggaauuggaugugggaucuc

SEQ ID NO: 4194196 - RNA, 126 nt, Human
gaggaaucuucuguucucaagaugcuugacuuuaccacaucuucaaagucucuaccuguguaaagcaacauagucacagguuccagggauuaggauguggucaucuuugaaggacugcuguuccuc

SEQ ID NO: 4194197 - RNA, 85 nt, Human
gaggaauugaagauuucuuuaugaaagauggcugaaacuccugacagcuuuucaaauucaucuuuggagaaacuuccguuuucuc

SEQ ID NO: 4194198 - RNA, 60 nt, Human
gaggacacuggacuccuggcagcagguucugucgaccccaccugugagucuuguggccuc

SEQ ID NO: 4194199 - RNA, 78 nt, Human
gaggacagaggccuauccaguguccaucuagucucuccuagacacgacguauggaugcagggugcagccucgguccuc

SEQ ID NO: 4194200 - RNA, 83 nt, Human
gaggacagauaagucauccucagagaacgaacacaaugaaggaaauuccagccuauucauguucuccucucaggcuguaccuc

SEQ ID NO: 4194201 - RNA, 130 nt, Human
gaggacagggcuucucugguggcuuggaguccuugcugcuucacuuuuuggagacaggacagauggagcccaggcguaggauaaauaaaccaaugaaaucugagaaaacaauguccugcuacuucucuuc

SEQ ID NO: 4194202 - RNA, 69 nt, Human
gaggaccaagauaagagacaagauuuaugacuagacuauauagauaauuguuucaauaucuuuuucuuc

SEQ ID NO: 4194203 - RNA, 90 nt, Human
gaggaccagaugggggcaguuggcccagggcuaucagacaccacuggauggaggcccacacuggguagaugcaccuucccccaggcccuc

SEQ ID NO: 4194204 - RNA, 76 nt, Human
gaggacguggcauguuuugggaagucagcucugggaagucacacugggcugcuccacuaagccaucccauuuccuu

SEQ ID NO: 4194205 - RNA, 68 nt, Human
gaggacucagauaaucuuugagucuucauugguguuaccauuagaaguguucaaaggaugucuuccuc

SEQ ID NO: 4194206 - RNA, 109 nt, Human
gaggagaaacggagccaucccccuuuuaaaaucagccacucugcagcgcuuuaggccgguuuucaugccugcagacugcgagcgugcugguggggguguaucccuccuc

SEQ ID NO: 4194207 - RNA, 104 nt, Human
gaggagaaagccaggaaaugacccauuggucccuagauccagaggccacaagaaaggacaggaaaucaggugaccauggggaaaagauuucuuugcugcuccuu

SEQ ID NO: 4194208 - RNA, 55 nt, Human
gaggagaagaaugaggcuggaggggccacauggcugccccagcuccacuucccuc

SEQ ID NO: 4194209 - RNA, 64 nt, Human
gaggagacccuggagcaauaaucccuggaaauaacaggaauuucaggggcaaauccagauccuc

SEQ ID NO: 4194210 - RNA, 60 nt, Human
gaggagagaacaagaguauccugaggcggucuccugcagugcucauagcuguuccuccuu

SEQ ID NO: 4194211 - RNA, 73 nt, Human
gaggagagaagacagaagugaugauuaaugggaucuuuuaccagauuccaggaacacucugugucccuuccuc

SEQ ID NO: 4194212 - RNA, 55 nt, Human
gaggagagacagcugaacaaagaaacugcccacucuccuucugcuguuuccccuu

SEQ ID NO: 4194213 - RNA, 89 nt, Human
gaggagagaggccugacuuuccugccaaggccagaguugccccuggcuccagcucgccuggcuggaucuggguccagggcuuccuccuu

SEQ ID NO: 4194214 - RNA, 65 nt, Human
gaggagagaggggaggcgaaccagagucuuguaugggucucuggaggauccuccucgcuugccuc

SEQ ID NO: 4194215 - RNA, 64 nt, Human
gaggagagcccucacuccuucccugaaccagaggacccaggcugaggcaguaggguuuggccuc

SEQ ID NO: 4194216 - RNA, 69 nt, Human
gaggagaggccaucguuguuauuaaaaauaagaauauaaauuguuaccaaacacugagggcuacucuuc

SEQ ID NO: 4194217 - RNA, 82 nt, Human
gaggagauugacuacaaagaaacauaugagaacuuuuggggguaauggaaauguucuauaucauuauugugacaguuucuuc

SEQ ID NO: 4194218 - RNA, 68 nt, Human
gaggagccuggccccacauccagcucauucaccuuuaacucaggcuuuucauggggcugggcugccuc

SEQ ID NO: 4194219 - RNA, 61 nt, Human
gaggagcgcgggguacacgcgguggccgcagacgccgagcccugcggagccccgaggccuc

SEQ ID NO: 4194220 - RNA, 94 nt, Human
gaggagcggccaggagaaaggagggaaaccaggagcagccggcccaccugccacggccugacuggcucuucugccucauccucuucugcuucuc

SEQ ID NO: 4194221 - RNA, 82 nt, Human
gaggaggagagaugguagauugggugaggggcaucacauaaacucuggagcuagacccaguucugcgguuauucauucauuc

SEQ ID NO: 4194222 - RNA, 60 nt, Human
gaggaggcugaacaaugcccuggacauguggacccagcagggugggguuccagccuuuuc

SEQ ID NO: 4194223 - RNA, 61 nt, Human
gaggaggcuguuucucugcauucuaggucaucuccagagaaacugcugguaacguuuccuc

SEQ ID NO: 4194224 - RNA, 61 nt, Human
gaggagggaugugguuguugggugaugcucucagggcacaagaauaaccauauuuaaucuc

SEQ ID NO: 4194225 - RNA, 77 nt, Human
gaggagggcagaggguggcugagagucguugcaauucugaagcuuaugcaaucucucagaaagcccaugucugaguc

SEQ ID NO: 4194226 - RNA, 64 nt, Human
gaggagggcaguuccucuuuuauguuuuaugaccaguuuuucauugagggguauugcuuuucuc

SEQ ID NO: 4194227 - RNA, 82 nt, Human
gaggaggguggaaggccuggaaggaggcugaagaaggagccucauuuucuggaugcuuccaucuaugucuucaucauuccuc

SEQ ID NO: 4194228 - RNA, 58 nt, Human
gaggaggucgcugcugagccccuaccucacucagugaggucagcuggcaggccuccuc

SEQ ID NO: 4194229 - RNA, 60 nt, Human
gaggaggugaauaguuuugagggauauuucauaaaaacccacagaauuauucuuguccuc

SEQ ID NO: 4194230 - RNA, 57 nt, Human
gaggaguaaguauaagauuuggagucagaccacaguucaaguuuugacuuaguccuu

SEQ ID NO: 4194231 - RNA, 96 nt, Human
gaggaguagggaggaucagacucagaaaugacgugggauaggaaaagcaaaacuuucugacgcacauuuucuguguaccugcucccuccacaccuu

SEQ ID NO: 4194232 - RNA, 62 nt, Human
gaggagucgcgcgccggcagccggcccacuccugagggcgcgggcucagcgcucggcuccuc

SEQ ID NO: 4194233 - RNA, 91 nt, Human
gaggagugccagggcacugaccuggacacccgcaacuguaccagugaccucuguguacacagugaguccucucugcccugagguccucuuc

SEQ ID NO: 4194234 - RNA, 64 nt, Human
gaggagugucuauguuuagucuuucuccuugccacagggaaagguuguaacaagacucuucguc

SEQ ID NO: 4194235 - RNA, 72 nt, Human
gaggaguuggucugaggaacaccagcacugccuuacagauaaugugggugacuguuucugagaccaagacuc

SEQ ID NO: 4194236 - RNA, 73 nt, Human
gaggaguuuauccgagggcauaagaaacuggcaacuucauguaaccauggcaaauuauguucuuugaauucuc

SEQ ID NO: 4194237 - RNA, 95 nt, Human
gaggauaaauauauacauggguuugucaacagugguuggcuuuggagaaggacaauucuuccuguuggauaugcuuuuguaaauguuggauccuu

SEQ ID NO: 4194238 - RNA, 70 nt, Human
gaggauaucauuaauuugcuagguuucguucccacagggaaauguuaaaaaccaguacaguugguucuuc

SEQ ID NO: 4194239 - RNA, 81 nt, Human
gaggaugaacauuuuaaggcuuuugauacauguugccaaaacgcucacuagcaaguuuguaucaauuugcuuuaucuccuc

SEQ ID NO: 4194240 - RNA, 85 nt, Human
gaggaugagaguagauaaucuguguaccuucaucggaggacacucccuaccuagacaugaacacagaugucccacucauacccuc

SEQ ID NO: 4194241 - RNA, 66 nt, Human
gcaaggcagcgcggaguagcuagaagcucagaaggaagcugagaauuguuggcucuggcugcaugc

SEQ ID NO: 4194242 - RNA, 67 nt, Human
gcaaggcaguccuggggcccugggcccacucagcgggagccaggacuccccggagagcucaccuugc

SEQ ID NO: 4194243 - RNA, 56 nt, Human
gcaaggcucccgcagcccagggcacucagagccccugggcucagccccagcccugc

SEQ ID NO: 4194244 - RNA, 75 nt, Human
gcaaggggaggcaagaugaagugaggcagggaccacaucuuguaacacccucaggcuucgucuuccaccccuugc

SEQ ID NO: 4194245 - RNA, 83 nt, Human
gcaagggguuccugaggggugauuugggacaggacaucuaaagccagguguacgcucacguccucagucccccaggcuccugc

SEQ ID NO: 4194246 - RNA, 57 nt, Human
gcaaggguccaguaacagaugccagauauucuucaggugauuauacugggcuuuggc

SEQ ID NO: 4194247 - RNA, 61 nt, Human
gcaagggugcaggcugccaccuucugaguuuuauaucaaaacuucucagccugcaccuggc

SEQ ID NO: 4194248 - RNA, 59 nt, Human
gcaagggugggacugggcggggccugaauacccucuggccacaaauagucuccccuggc

SEQ ID NO: 4194249 - RNA, 70 nt, Human
gcaaggucagggcugcagaagaggcaggugggguagcccugccuucucucccagucagcccucaucuagc

SEQ ID NO: 4194250 - RNA, 58 nt, Human
gcaagguggcugcauagucuccagugugaacaaagucuggagauaagcagucccaggc

SEQ ID NO: 4194251 - RNA, 129 nt, Human
gcaaguaagacuguacuuugguuuggaacucuaccaacaguagucacaauuucagaaacacacuucacugacagcaacauuacucuugguauuugaguugccagcacaccugucucuaucuacacuugc

SEQ ID NO: 4194252 - RNA, 103 nt, Human
gcaaguagugguguuuaagaaguauauaagguucagggacuggcuuuccuuaauugauacuaucuuuucuguuaaagucccugccuuaauucccauuacuagc

SEQ ID NO: 4194253 - RNA, 88 nt, Human
gcaagucaagcuucucuccaucugcuuccuccuuagggaaaaucuaaugcuaaaaugacuuucuaaggggaggaagcacagcugcugu

SEQ ID NO: 4194254 - RNA, 58 nt, Human
gcaagucugaaagcaaggaaauguucuccucccccacaccacuuugcagcagacaugu

SEQ ID NO: 4194255 - RNA, 87 nt, Human
gcaagucugcucagaaagugaugaacucugugaccuggagauuaauuuaaaauacaguuuagucauuuauugagcaccacuguaugc

SEQ ID NO: 4194256 - RNA, 59 nt, Human
gaggauguuuucagucuugugcuauuacaaacaauacagcaaugacugaguacauuguc

SEQ ID NO: 4194257 - RNA, 64 nt, Human
gaggcaaaaaguagauuguacccaccugcaacaggugaggcaggcauucuccuuucuguggcuc

SEQ ID NO: 4194258 - RNA, 95 nt, Human
gaggcaacuguggccauuuggagcagcaguuauuccaacaggcuguuaauuaaccuguucaugaaacugcuuuccuaguuucgccauaguuucuc

SEQ ID NO: 4194259 - RNA, 57 nt, Human
gaggcaaggucauguuucuuucuguagugucaagaggagaaucuguuuucuugucuu

SEQ ID NO: 4194260 - RNA, 58 nt, Human
gaggcacaguucuuccuccagauacaauguugguaagaccaggaaucacugugcccuc

SEQ ID NO: 4194261 - RNA, 63 nt, Human
gaggcaccggagaccccagaguccagucugagacggcacagggagcaggucucugguggccuu

SEQ ID NO: 4194262 - RNA, 102 nt, Human
gaggcacuccugcucuguacaagggcuggcuucuucccuggaucuagggguugccccugccuuuuagaagacagaugcacagccccagagccuaguugccuc

SEQ ID NO: 4194263 - RNA, 79 nt, Human
gaggcacugggugggaaggugaacuggucucccaggguagaaaaugaagggacagugugggccaucucacucaggccuc

SEQ ID NO: 4194264 - RNA, 81 nt, Human
gaggcagaaaaaucgcuugaacccaggaaguggagguugcauugcacuccagacugggcaacaagagcgagacuccgucuc

SEQ ID NO: 4194265 - RNA, 100 nt, Human
gaggcagaagaaucacuugaaccccgggaggcggagguugcagugaguggagaucacgccacugcacuccagccugggugacagagugagacuccgucuc

SEQ ID NO: 4194266 - RNA, 65 nt, Human
gaggcagacaaggucccuggucuuugggagcuaccaaugaacuaggaaaggggccugucugcuuc

SEQ ID NO: 4194267 - RNA, 56 nt, Human
gaggcagagaccuucaggaccucacuggaaugugaguucugagggcguucugucuu

SEQ ID NO: 4194268 - RNA, 62 nt, Human
gaggcagagccagucucucacuaaaaaaugcuguuaaaugucagauacuagcucucagccuc

SEQ ID NO: 4194269 - RNA, 73 nt, Human
gaggcagagcuugcagugagccgagauugugccacugcacuccagccugggugacagagcaagacucugccuc

SEQ ID NO: 4194270 - RNA, 99 nt, Human
gaggcagaggaaucacuugaaccugggaggcggggguugcagugagccgagaucgcgccauugcacuccggccugggugacagagugagacucugucuc

SEQ ID NO: 4194271 - RNA, 74 nt, Human
gaggcagagggcucggcggccgcucccgcguccccgcggcgcggcagcccggcacgacccagcacuuuguucuc

SEQ ID NO: 4194272 - RNA, 94 nt, Human
gaggcagauauggcauuuugguaaugugguauacagauuacugaauaauuacauaagcucuggacagccacauuuccuaacaugcaugugccuc

SEQ ID NO: 4194273 - RNA, 59 nt, Human
gaggcagcugaccacaguaugaugcagguccuuugaauauuuucugugauagcugucuc

SEQ ID NO: 4194274 - RNA, 100 nt, Human
gaggcaggaaaaagcgcuugaacccaggaggcggagguugccaugagccgagaucgugccauugcacuccagccuuggcaacaagagugaacucugucuc

SEQ ID NO: 4194275 - RNA, 99 nt, Human
gaggcaggagaaucacuugaaccccggaggcagagguugcagugagccgagaucgagccacugcacuucagccugggcgacagagugagacucugucuu

SEQ ID NO: 4194276 - RNA, 91 nt, Human
gaggcaggagaaucaucugaacccaggagacagguugcagugagccgagaucaugccacugcacuccagccugggcaugagacucugucuc

SEQ ID NO: 4194277 - RNA, 99 nt, Human
gaggcaggagaaucgcuugaacccaggaaguggagguugcaguuagcugagaucgcaccacuauacuccagccugggugacagagcgaaacccugucuc

SEQ ID NO: 4194278 - RNA, 99 nt, Human
gaggcaggagaaucgcuugaaccuggcagguggagguugcagugagccaagauugugccacugcacuucagccugggcaacagagugagacucuaucuc

SEQ ID NO: 4194279 - RNA, 99 nt, Human
gaggcaggagaaucgcuugaaccugggaggcggaggcugcagugagccgagaucgcgccauugcacuccagccuggacaacagagcgagacucugucuc

SEQ ID NO: 4194280 - RNA, 98 nt, Human
gaggcaggagaaucgcuugaacucggcagguggagguuguagugagccgagaucacgccacugcacuccagccugaugaaagaguaagacuccgucuc

SEQ ID NO: 4194281 - RNA, 99 nt, Human
gaggcaggagaauggcgugaacccgagaggcggagcuugcagugagccgagaucgcgccacugcacuccagccugggugacagagcaagacuccaucuc

SEQ ID NO: 4194282 - RNA, 100 nt, Human
gaggcaggagaauugcuugaacccgggaggcggagguugcagugagucgagauugcaccauugcacuccagccuuggcaauaaaagcaaaagucugucuc

SEQ ID NO: 4194283 - RNA, 97 nt, Human
gaggcaggagaauugcuugaacucgggaggaggcugcagggagccaagauugugccacuguacuuccagccugggugacagagcaagacuccgucuc

SEQ ID NO: 4194284 - RNA, 100 nt, Human
gaggcaggagaauugcuugagcucaggaggcagagguugcagugagccgagauugcaccguugcacuccagaguggacaacaagggcaaaacuccgucuc

SEQ ID NO: 4194285 - RNA, 98 nt, Human
gaggcaggagaauuucuugaaccccagaggcggaggcugcagugagccaagaucgugccauugcacuccagucugggaacaaagcgaaacucugccuc

SEQ ID NO: 4194286 - RNA, 97 nt, Human
gaggcaggagacucauuugaacccgggaggcugagguugcagugagccaagauggugccauuguacuccagccugggugacagagcgagacugucuc

SEQ ID NO: 4194287 - RNA, 100 nt, Human
gaggcaggaggaucacuuguacccuggagguggagguugcagugagcggagauugccucacugcacuccagccugggggacaagagggagacuccgucuc

SEQ ID NO: 4194288 - RNA, 99 nt, Human
gaggcaggaggauugcucgagcccaggaguuggaggcugcaguaaggugugauugugccacuguacuccagccugggaaacagagcaagaaccugucuc

SEQ ID NO: 4194289 - RNA, 99 nt, Human
gaggcaggaggauugcuugagcccaaguguuggaagcugcagugaucugugaucacaccacugcauuccagccugggcaacagagcaaaacccugucuc

SEQ ID NO: 4194290 - RNA, 94 nt, Human
gaggcaggauugcgugagcccaggaguuugaugcugcagugagcuaggauggugccacugcacuccagccuggguaacagccagacccugucuc

SEQ ID NO: 4194291 - RNA, 83 nt, Human
gaggcaggcaccuugaaucuguuuucuuaguacuguggggaagagaucugccugggaaagcaagguuguggauuuccagucuc

SEQ ID NO: 4194292 - RNA, 77 nt, Human
gaggcagggcucgggcugggaguccagcaaucugcccuugggcagugucugaagccucagcccgaaaagucucucuc

SEQ ID NO: 4194293 - RNA, 59 nt, Human
gaggcagugagaaauagcaagauuuaggcagaaacuacacguuuuguugcuacuggcuc

SEQ ID NO: 4194294 - RNA, 88 nt, Human
gaggcaguggagagaugguaacccuggggcugcauuacuaaggcagcuuuuaugcacauaagggucacuguuucuugcucucugccuu

SEQ ID NO: 4194295 - RNA, 68 nt, Human
gaggcauaaguagaagagauuguuaagaaggguauucaugugucuuugcucuuucugcuuuaugccuc

SEQ ID NO: 4194296 - RNA, 66 nt, Human
gaggcauagggcagaguccaggaugggcucaauauagagcucuaguugcccucucccuguggcuuc

SEQ ID NO: 4194297 - RNA, 71 nt, Human
gaggcauaugugacuguugaaaguagggguuuugaacucgaccucccuagguccuagucacaguaguccuc

SEQ ID NO: 4194298 - RNA, 65 nt, Human
gaggcaucccuugauguccugcucuagggaggagaagggugaggaguggcugucaagggggccuu

SEQ ID NO: 4194299 - RNA, 70 nt, Human
gaggcaugaacagauucuucauuucugauagacaguacagucuagaggucugauauuuguuguaugaauc

SEQ ID NO: 4194300 - RNA, 64 nt, Human
gaggcaugauuuucucccuggcaacugacuagagucaagauugaaggaggcgaaaauuggucuc

SEQ ID NO: 4194301 - RNA, 57 nt, Human
gaggcauggccugaggcuaggauaaacucccauuuaaacuacuuuauaauaugccuc

SEQ ID NO: 4194302 - RNA, 58 nt, Human
gaggcaugguagauggguagcacugugcuggcacacccuacccucacucccauuccuc

SEQ ID NO: 4194303 - RNA, 93 nt, Human
gaggcauucaggguggcugaauuagguggaggaggaugguggggggcgacagugucguccccuccucucccuaagagucaccagccaugccuc

SEQ ID NO: 4194304 - RNA, 84 nt, Human
gaggccaaagaugcugcucuaggcugcuccgugaauuccaggacuucugagaagcaccuucuggacagcgucuuuacugcccuc

SEQ ID NO: 4194305 - RNA, 111 nt, Human
gaggccaagaccuuguuuaccaccucgcaggacagugcuaggacuagugguugagauuuccuuuugaaguccagggcucucugugggaugguugacaauucuuuuggccuu

SEQ ID NO: 4194306 - RNA, 81 nt, Human
gaggccacacuuacaccaggcugcuccuagccagugacugggcauggcagggguccugguguugacucagugcaauuccuc

SEQ ID NO: 4194307 - RNA, 58 nt, Human
gaggccacagcuaucagggacauagcugaagccagugucuuugaugucuaugugcuuc

SEQ ID NO: 4194308 - RNA, 55 nt, Human
gaggccacuuccuacuggaggagacccuggaagucucccuggaggugguggcauc

SEQ ID NO: 4194309 - RNA, 73 nt, Human
gaggccagacuagagagccaaccgucagggagccgagcagccucuggcuuggcuggcaucucugcccagucuc

SEQ ID NO: 4194310 - RNA, 77 nt, Human
gaggccagccagugucuagucacagguacuuaucuaagccucauaauuauuuggaauaggcauugcauuugugccuc

SEQ ID NO: 4194311 - RNA, 77 nt, Human
gaggccagcgugggaguggggcauagaagguauugccauuucuucaauauauucuuucaccuucuuccugccgccuc

SEQ ID NO: 4194312 - RNA, 103 nt, Human
gauauucauugcuaaauuuacaagauuuggcugaaacuccaaacgucuguccuaucacgguggaguauuagucagucuuuaaaaccuuuagcuuacuguacuc

SEQ ID NO: 4194313 - RNA, 81 nt, Human
gauauugacuuuaaaauggaauaugcaggaauaccuauguuuuaauuguacaaggucauuguugcauguucucucaauguc

SEQ ID NO: 4194314 - RNA, 91 nt, Human
gauauugguguuaaacaguacucgauuuuuguagccuacuucaccuguggaguuuuaugaagaacugagucugucaccucagcacuauuuc

SEQ ID NO: 4194315 - RNA, 62 nt, Human
gauauuuaacucucacagguccucaaugcaguguaaucuacacaccuuugagaagaaauguc

SEQ ID NO: 4194316 - RNA, 127 nt, Human
gauauuuaggcuugguauucacuauucauguuuccuaacuauucacaaggugggacuaucuagcagaguuuguggugugggaaacagagaauagaaaauauuauuuaacacuguagccuauuguauc

SEQ ID NO: 4194317 - RNA, 77 nt, Human
gauauuuuuguauacauuauccuguuucacuuaacacagagcuuagggcuggaacagagagaaugugcaggauuguc

SEQ ID NO: 4194318 - RNA, 77 nt, Human
gaucaaacaaguucucuaggaaguauaaagguuuuuacucuaauucuuuuggcuuaaagagaauguauauuuagauc

SEQ ID NO: 4194319 - RNA, 56 nt, Human
gaucaaauaugagaaaugucagguguggaauaagcccugacagaaaauauuucauc

SEQ ID NO: 4194320 - RNA, 87 nt, Human
gaucaaaugcccagucuggaucuucacaagagagggcgucccuucuggaugccucacuaggacuccagcucacuguggcaucggguc

SEQ ID NO: 4194321 - RNA, 58 nt, Human
gaucaacuuuuagcaugguaccuacgguaaguaaaacagguacuaaugaaaagugauu

SEQ ID NO: 4194322 - RNA, 79 nt, Human
gaucaaggugucaacaagguugcuucuucugaggaccucucugucuucacaugauguuuccucugugcaugccugaguc

SEQ ID NO: 4194323 - RNA, 72 nt, Human
gaucaagucugagguuuguccauccuugguggcaggcuagcuuaaccauggauucacaaaccccauuugauu

SEQ ID NO: 4194324 - RNA, 64 nt, Human
gaucaauucaaacuauuuuccuagauccuaauucuuuggagguaggaggaaagggugagugguc

SEQ ID NO: 4194325 - RNA, 55 nt, Human
gaucacagauuccaugugccggguccaugcugagggcuggcagccugucuguguc

SEQ ID NO: 4194326 - RNA, 60 nt, Human
gaucacaucgaggagcaaucagauggcagccugugaucucucugggauauugaugugauu

SEQ ID NO: 4194327 - RNA, 72 nt, Human
gaucaccuggcuugguggucacagcccugaggaauggaguuucuggagaaucaccaccaggccagaucgauc

SEQ ID NO: 4194328 - RNA, 84 nt, Human
gaucagacauggggagccagaaaagcugccugacuuagguacgagagagucagggcaggcuucuggcaggaagugauauugauc

SEQ ID NO: 4194329 - RNA, 55 nt, Human
gaucagagccugccucaaaagccucagccuugugacuuuuguguagcugcugguu

SEQ ID NO: 4194330 - RNA, 63 nt, Human
gaucagaguggcuagagccuugugacuuuucucuuacuuucugcucuugagcuucucuguguc

SEQ ID NO: 4194331 - RNA, 64 nt, Human
gaucagaugugguucaucaucuuugaauaauauuaaguguuuaauaauguugaauuacuagauc

SEQ ID NO: 4194332 - RNA, 103 nt, Human
gaucagcggugacuagauucucauaggagcgugaaccuuauugugaacuguguaugcgagggaucuagguugcacacuccuuaugagaaucuacugccugauu

SEQ ID NO: 4194333 - RNA, 60 nt, Human
gaucagugcugagagacuaucaauauaggaugaucuguuugaaucuuagcagggcugguu

SEQ ID NO: 4194334 - RNA, 60 nt, Human
gaucaguguaagaauucaaagccuacugguuaaaaccauuagucuauuccuggacugguc

SEQ ID NO: 4194335 - RNA, 98 nt, Human
gaucauaaaucaagacaauauaugauucaaacagcugccugggugugauauaaagcaaacuguggcugccuguugaguaugucccaauuuguaugauc

SEQ ID NO: 4194336 - RNA, 70 nt, Human
gaucauaaaugauauggucacccuuaugaaugacuggugaucuuucauaaggguggccauauaaaagauc

SEQ ID NO: 4194337 - RNA, 55 nt, Human
gaucauccgacauggucucucuggugaugcugacaaggugacguuuuggaugauu

SEQ ID NO: 4194338 - RNA, 61 nt, Human
gaucaucugaaccaaggacagauucauguguccuaauucacacugucugguucauguguuc

SEQ ID NO: 4194339 - RNA, 78 nt, Human
gaucaucuuucaucucuauuauuugacagcauauauuucaucuuauguaguagaaucauauggaugaggguuuuuuuc

SEQ ID NO: 4194340 - RNA, 63 nt, Human
gaucaugcagaguuuauuaccaucuaaacgaauauggcgaguugguagaacuuugcaauuguc

SEQ ID NO: 4194341 - RNA, 86 nt, Human
gaucauuacauuuugucauccugagagauguguuaaauucagacaauuuauuauauccuaggggaauuaugucauaagcugugguc

SEQ ID NO: 4194342 - RNA, 91 nt, Human
gaucauuaucaucauuaagcauuuaugaagcacuuuagaguuauuuacuagaacucaugauaugccuauaagauagauugguauaaugguc

SEQ ID NO: 4194343 - RNA, 130 nt, Human
gaucauuauuacugcagaaaguaauagccuucuguuuuugagucuucaguaaaaggguaagaaaaguaguuuucauuuuaaauauucugcucugauaccaagaacagaaaguaaugcaguuuuaaguguc

SEQ ID NO: 4194344 - RNA, 80 nt, Human
gaucauuucuucacaggguauugggugcaacgcaaguauacaauuugaaaacgucuuugguauucacuugugaagagauc

SEQ ID NO: 4194345 - RNA, 101 nt, Human
gaucauuuucuugccaucaugguacaaaugagaguucuguuuuaugguaacuaaaaaaaguucuuuacuuauuuguuaugauaugggguauuuugaugauu

SEQ ID NO: 4194346 - RNA, 103 nt, Human
gaucauuuuggcucaagagacuggaggagaacuugaggaaggaaccaaaucaauuccuuuuccacaauuuuguuccaaaaaugucucaagauugaaauugauu

SEQ ID NO: 4194347 - RNA, 76 nt, Human
gauccaaagaacauugcugagaccuagauauaccuuucccagaucaauaaauucggguccaguaggucuuuggguu

SEQ ID NO: 4194348 - RNA, 76 nt, Human
gauccaaguccugugcaaaugcaucugacuggcgaacagaaaucccaucaagaacagcugcagggagacugggguc

SEQ ID NO: 4194349 - RNA, 128 nt, Human
gauccaccuuguuaaucugcauacgacauucuuucacaccugcaaggagcuuucauuucacauuugcaaggugaaggugaggcccuugcaggggauggggauggguagagcagugucugagguagguu

SEQ ID NO: 4194350 - RNA, 66 nt, Human
gauccacguguagugacuugguuugggaaaaaagaauccacagggagaggaacagcgcagaggguu

SEQ ID NO: 4194351 - RNA, 55 nt, Human
gauccagauauuugggcugguauacauaaugaugccauguucuugaaucuggguc

SEQ ID NO: 4194352 - RNA, 73 nt, Human
gauccaggggcuggaggcuggggaggaugaggucagcugaugggaaucacacccagcuccaggaccuuggauc

SEQ ID NO: 4194353 - RNA, 72 nt, Human
gauccagguuguucuaugccuccuauaugcucgguacugggucauauacacugcauguaaucagcuuuaauc

SEQ ID NO: 4194354 - RNA, 109 nt, Human
gauccaugauuaacccccucgcuaauuggccaccagccccuugacuuugcugcaggccuucucaggagcugggagcaagaggcugcaaauuggccaagcaggauggguc

SEQ ID NO: 4194355 - RNA, 88 nt, Human
gaucccaucacucaaggaggagaaggauguuuccaguuuucauuucuguagguaaguuauauccuucuccuccuugagugacaugauc

SEQ ID NO: 4194356 - RNA, 82 nt, Human
gaucccuaugacuuggucauuacugaaaaggcaacaaaauugaagacugucuucucauaauuagguaagucagagauggauc

SEQ ID NO: 4194357 - RNA, 56 nt, Human
gaucccuucuuuuucagagaauauagcgugaugagcaaaucugagaaaggagaauc

SEQ ID NO: 4194358 - RNA, 79 nt, Human
gauccuauaagcuaaacauuaugguaggagcugucaguuugaaacagacauggauuucuuacauaaaggggcuuagauu

SEQ ID NO: 4194359 - RNA, 67 nt, Human
gauccuggacggcugcguggaggaggcaguguucaagcagaggucccagggcagcuguccagaaguc

SEQ ID NO: 4194360 - RNA, 78 nt, Human
gauccuguuugauggacuuaaugcacacuuuagcagaggguucuguaugauguguaccuaagucaccggaaacaaauc

SEQ ID NO: 4194361 - RNA, 82 nt, Human
gauccuugugaggacucaggaccacuuguggccuugugugaaggccaucagugguaacugaaugguucuaagcacaauuauc

SEQ ID NO: 4194362 - RNA, 72 nt, Human
gaucgggagagagggaaagggccgagcugcuucaugaccuccagcaggcuccuuccuucucugggccucuuc

SEQ ID NO: 4194363 - RNA, 64 nt, Human
gaucggguggguucugccaucaggaccagggagcccacugaguggccuggagccccgccugguc

SEQ ID NO: 4194364 - RNA, 82 nt, Human
gaucuaagcuuaucuuaaucucuguuggcuuuuuauuuauagaugaagaaacuggaauauagagagcuuaaguguuuagauc

SEQ ID NO: 4194365 - RNA, 59 nt, Human
gaucuauauauucuauguuuugaaaacacuauauguguaacaugauauguguauggauu

SEQ ID NO: 4194366 - RNA, 76 nt, Human
gaucuauuguauagcuuugggacauaaguugcuuuucuuagguaacaucaaacauguuuuaaaguuauucauuguc

SEQ ID NO: 4194367 - RNA, 60 nt, Human
gaucucaagagacuaagaaagggcaauaauaguuguugcaccugccuugcuuuagagauu

SEQ ID NO: 4194368 - RNA, 90 nt, Human
gaucucagaaccuuccaaacauggaacuucaagaagaaagcacuaagaaucagugcuuuucucucuccuuccccuuugaagcuuuggguc

SEQ ID NO: 4194369 - RNA, 82 nt, Human
gaucucuaauacccauuaguguuagggccuguuaccucaaucaugagugacagagcccuaauuauuaagguaauuagaaguu

SEQ ID NO: 4194370 - RNA, 62 nt, Human
gaucucucuagugccaggaaagaacauuuaaagaugugacuaacuugguaccagaucagauc

SEQ ID NO: 4194371 - RNA, 88 nt, Human
gaucucugagauuucuaauaguugagucagcuacuguuggaaugagaaaagcucuaguugucuauaacauguugaauuugucagacuc

SEQ ID NO: 4194372 - RNA, 67 nt, Human
gaucucugcuggcagguuauagagcugcccuuucuccuugggcucucccacaacgugccaguagauc

SEQ ID NO: 4194373 - RNA, 62 nt, Human
gaucucuguggacucuuagcacucaaccuucagauccgagcugcaacgaguuuccagagguu

SEQ ID NO: 4194374 - RNA, 122 nt, Human
gaucugaacaggcagggagaccccaggugacaccuggguuauagguacucuagauaaguaaucugagccaccugagcccauggugggugguucuggccuguuuuccugccagguuucugguc

SEQ ID NO: 4194375 - RNA, 87 nt, Human
gaucugagcaggggaaggauguggcuagaggggcauuuuagacagacaagauccucuguggauuacaccuaggcuaagcaacggguu

SEQ ID NO: 4194376 - RNA, 55 nt, Human
gaucugauuaccuuacuccucaggcagaauccccuggagaggcugggaacagguu

SEQ ID NO: 4194377 - RNA, 75 nt, Human
gaucugauugauauuucuguuuacccuuagcucagguaauuaagaguugacaccaaggaaguaucauuuaguauu

SEQ ID NO: 4194378 - RNA, 63 nt, Human
gaucugccugucucagccucccaugugagccauggcgccaggcuggagggcaauggcaagauc

SEQ ID NO: 4194379 - RNA, 73 nt, Human
gaucugcugcugcugcucagugugaacaagggcugcucccuugucuugcacagaugcagccugcacagcuguc

SEQ ID NO: 4194380 - RNA, 94 nt, Human
gagggcagcaggggaggacagagaucugggccagccccaagagaccccccaggccucucuggcaucuggccaggcuggcuuccuagcagcccuc

SEQ ID NO: 4194381 - RNA, 84 nt, Human
gagggcaggggaggggcucagucuuucuuggcagcagcuuuccucauggcggccaguacguugcucagcuccucccgcuuccuc

SEQ ID NO: 4194382 - RNA, 88 nt, Human
gagggcaguguccccagggggagcaccauggcgcagggaucacagggucuucuugaaaccugcucccucaaaugcuggcaguguccuu

SEQ ID NO: 4194383 - RNA, 64 nt, Human
gagggccagccugccaagggccugagggacaggaacaagaacagcgcucuccgggagagccuuc

SEQ ID NO: 4194384 - RNA, 78 nt, Human
gagggccagguauaguuugaucuucaguuuccucucuggauuugugugacuuuggaauaagcuauauaacuuaccuuc

SEQ ID NO: 4194385 - RNA, 64 nt, Human
gaugaaggaauauugcugagcuagaaacuucuaaggacucucuuagcuuuaauauucccacauu

SEQ ID NO: 4194386 - RNA, 113 nt, Human
gaugaaucaggaaaagagagaacagagauggggccagcugcucccagauccuuagacauucuaaauaagggggagagacucagucuuuucugauuaaucuuugaugauuuauu

SEQ ID NO: 4194387 - RNA, 89 nt, Human
gaugaaugaugggaauauaacagguuguagaauuggagaacguuaaaucuuuguuccuaauggcaaaacauguuuuucucauuuucauc

SEQ ID NO: 4194388 - RNA, 89 nt, Human
gaugacaaagcauugaugaacagucaaaaagugaccauuacucuacuaagagauggccuauaauuugcuuucauuucugcuuugcaauc

SEQ ID NO: 4194389 - RNA, 64 nt, Human
gaugacagcucagaguuucagaaauuuaagacaacagcaggauuagacacuuuggguugucuuc

SEQ ID NO: 4194390 - RNA, 64 nt, Human
gaugacaguucuagcaucugaacccugcccaagacggggcuccucagcauccugagcuguccuc

SEQ ID NO: 4194391 - RNA, 79 nt, Human
gaugacauuuaauuggaugguuuaaguuguaggaccccaaaagaugggcuucacaauggcaaaccauuaaauggucauc

SEQ ID NO: 4194392 - RNA, 77 nt, Human
gaugacccuggugggcacuggcaccugaaugauaauuacaaacucagcaacagagugcucugccacuguggucacuc

SEQ ID NO: 4194393 - RNA, 75 nt, Human
gaugacuaagucuagauucuaguuggaaguuaagaaacugagcuucacuucuggauagagucagcuuucaccauc

SEQ ID NO: 4194394 - RNA, 59 nt, Human
gaugagaaaguggcauucuaaaagaaaggagacuucaucuuucagagugucuuuccauu

SEQ ID NO: 4194395 - RNA, 88 nt, Human
gaugagaaccuucucauucuccaucuggccagagauaaaacaaaacuagcuggcuggaggaggaagugugagggcuuggcuuuucauu

SEQ ID NO: 4194396 - RNA, 76 nt, Human
gaugagaucaugauaccgcagauucauggcaauuucgacaaacagcacagaacucuauauucaugaacaacucauc

SEQ ID NO: 4194397 - RNA, 67 nt, Human
gaugaggcucuuaauuugaaaagaauaugagaauuaaugcuugaguuuaauuggagccugaaucauc

SEQ ID NO: 4194398 - RNA, 97 nt, Human
gaugagggagcugagguucagagaguccuggucauuugcccaauaucauaggacuagcagaugucaggcuguuuuuccuucuggagucucccuuauu

SEQ ID NO: 4194399 - RNA, 77 nt, Human
gaugaggucaucggccgguggugcagaggacugaucuccccuaacaauugaccagcucucuagcccugguccucguu

SEQ ID NO: 4194400 - RNA, 71 nt, Human
gaugaguauuucccacaaaugacagaauguuggacuuaaaagguucuguggcaguuugggaggugacaguu

SEQ ID NO: 4194401 - RNA, 55 nt, Human
gaugagucacucagcagaaaagguguguccaggcgccugccugccucggcucauu

SEQ ID NO: 4194402 - RNA, 69 nt, Human
gaugagucuggagaucaugugggguggauuauuuucuuauuuuugcacuguacauauuucccacuuguc

SEQ ID NO: 4194403 - RNA, 96 nt, Human
gaugaguguccugcugugggccugaugcugccaugagucccugcugcgcacccgcucugccuggccagcccucgggccacacugugacccucuguc

SEQ ID NO: 4194404 - RNA, 88 nt, Human
gaugaguuuauuuuccacugucaggaauucagaguuugaaugauuuuaccacugcucuguucuuggugcagcugggauucuauuuauc

SEQ ID NO: 4194405 - RNA, 57 nt, Human
gaugaucagacuccagcuuaauucucaaaacucagagaagggaaggauucugucauu

SEQ ID NO: 4194406 - RNA, 56 nt, Human
gaugaucucgcuuucugugcuuugaaugaucacguggacacaggaaggggaauauc

SEQ ID NO: 4194407 - RNA, 67 nt, Human
gaugaugaucugagagcuuguuacauaaugcuuucaauccugugaggcaaguacuaucaucauuauc

SEQ ID NO: 4194408 - RNA, 59 nt, Human
gaugaugcuuugucaguauguuuuugguguuucaaguuuauagucacuugagcauuauc

SEQ ID NO: 4194409 - RNA, 55 nt, Human
gaugaugggcauucuuuggcuugcagcuaugucuuucaaagcacugccugucauc

SEQ ID NO: 4194410 - RNA, 66 nt, Human
gaugauguuuaaugcuugaauguuuggaagaagagugcuuugcaaaugucaaggguuaguguuauc

SEQ ID NO: 4194411 - RNA, 63 nt, Human
gaugauguuuacacauagcaggugcucaauaaauauaugugacugauugugaaagucaucauu

SEQ ID NO: 4194412 - RNA, 106 nt, Human
gaugauuaguuuguuuguuuguuuguuuauucauuuuacaauucuucuauguucaguuagugaaagguuguaagauggauaggaacagcaagacucaaugauuauu

SEQ ID NO: 4194413 - RNA, 57 nt, Human
gaugauuuuguuggugauucaaucuguaaaccuugaugaguuauucgcuuagucauu

SEQ ID NO: 4194414 - RNA, 71 nt, Human
gaugcaagugaguucagcauucacucguuuggugcacucaagugcugagagaaugcagaauuuacaguguc

SEQ ID NO: 4194415 - RNA, 72 nt, Human
gaugcacaugugaguauagaaggcaaucuuugucuuuuuuccuuuaaaauuuaacuucuccucauauguauc

SEQ ID NO: 4194416 - RNA, 122 nt, Human
gaugcacucacuaacuauugcagcauaaccaaucacuccacaacuuagcagcuugaaacagcaaacauuuauugucucaguuucuguggguuaggaauuugggcauggcuuuccuguguauc

SEQ ID NO: 4194417 - RNA, 57 nt, Human
gaugcagaaaguagacaccaucuagucacuuuaaggagaaggugucccaacugcguu

SEQ ID NO: 4194418 - RNA, 64 nt, Human
gaugcagagggcugggggaaaaaaucauaaggcuuguggggaucuucuagcuuuucacugcguu

SEQ ID NO: 4194419 - RNA, 77 nt, Human
gaugcagcacaaauaucaacaguguccuucuaagucaauauuugcuaggaaaagcacaggauguucuuguugucauc

SEQ ID NO: 4194420 - RNA, 63 nt, Human
gaugcagcagaggccuugugauacuccccuucagauggaguauuacaaagcaagugcuguguc

SEQ ID NO: 4194421 - RNA, 69 nt, Human
gaugcagcagucccugcaguggggaaaacucaguccaugaacauucacaccagcagggggugcugucuc

SEQ ID NO: 4194422 - RNA, 104 nt, Human
gaugcagccgcuaaacagggaagucucuccucuuccacggacugggcagagccaacgcguccagagccggaagagugacagccuuauuuuugucugugcucauc

SEQ ID NO: 4194423 - RNA, 99 nt, Human
gaugcagcgaugacagagaccacagggcgcucugauuccugguggcuuuguaaccccauaaguccuggcuguguuugguuucuaucauaccucugcauu

SEQ ID NO: 4194424 - RNA, 58 nt, Human
gaugcaggugugccacagagcuucuccaagagugagugcugugcaggugccccugcuc

SEQ ID NO: 4194425 - RNA, 70 nt, Human
gaugcaguggaaagaacccuggacucagaauuaaaaaaccugggugugaguccugucuuugucacuuauc

SEQ ID NO: 4194426 - RNA, 120 nt, Human
gaugcaguuauaucagauaaacccauuuuaagcugaaaauauggugaaguugaagaagcacuucugccuuacgauauuuucaauuuauaauggauggguuuauucagacauaacuccauu

SEQ ID NO: 4194427 - RNA, 55 nt, Human
gaugccagcaggugcaaaugcccuggggcagggcagugcuuggcacagcuggguc

SEQ ID NO: 4194428 - RNA, 77 nt, Human
gaugccaguagaggccaggccucccuggcagagcuaaguagcauggcucagggaggcccugggacccuugccagcuc

SEQ ID NO: 4194429 - RNA, 58 nt, Human
gaugccugaaugaucagucagauucucaucuggaaaucugaaauucaaucagggaguc

SEQ ID NO: 4194430 - RNA, 55 nt, Human
gaugccuuaggucaugacucuuggaaccaguagaccacagagggcucaaggcauc

SEQ ID NO: 4194431 - RNA, 57 nt, Human
gaugccuuuacucuugggucuauugcuauaaagcaaaagagccuggaaaaagacauc

SEQ ID NO: 4194432 - RNA, 73 nt, Human
gaugcgacuguucauggcccgaggccaccaacaaggagaucuggcugccucauggccuugagcugagggcauc

SEQ ID NO: 4194433 - RNA, 70 nt, Human
gaugcuaguuuuuccaugcuaaccagagacauaaagugguuuucuccacuuuugguagaaaagcuacauc

SEQ ID NO: 4194434 - RNA, 58 nt, Human
gaugcucuugauuggaccagggguaggucccgacccaagcugggacaaugaaagcauc

SEQ ID NO: 4194435 - RNA, 56 nt, Human
gaugcucuuugcugccucaguuuuuccaacuggaaaacggaaugaguaagaguauc

SEQ ID NO: 4194436 - RNA, 57 nt, Human
gaugcugacugguguuugccuucugucauauccucaggauuagcaccagaucauauc

SEQ ID NO: 4194437 - RNA, 61 nt, Human
gaugcugcucgggugccugggagcuccuggcugggaggucucugcauguccugagcacauc

SEQ ID NO: 4194438 - RNA, 91 nt, Human
gaugcuggcaggguagcugauggccugcugugcaugcuugcuucugccugcccugcccaggcccaggccagugguucccuucucuagcauc

SEQ ID NO: 4194439 - RNA, 77 nt, Human
gaugcugguuuaaaaugcaaauuccuagauucucucuccaaucuagcugagucagaauuguauuuuaaaccagaauc

SEQ ID NO: 4194440 - RNA, 75 nt, Human
gagguggcuggcugguuuuggugagcuccgaagcugaggaggcugccggggcugccuggggcugccucccgccuc

SEQ ID NO: 4194441 - RNA, 96 nt, Human
gaggugggaauccuggggauggggauggggucacucuggaccugggggucccuccuggcuggcccugcccucuucaucuuuggaaguucccuccuc

SEQ ID NO: 4194442 - RNA, 69 nt, Human
gaggugggaggaucacuuugaguccaggaguuugagaccagucuggaaaacaaagugaguucccauuuc

SEQ ID NO: 4194443 - RNA, 60 nt, Human
gaggugggcugggggcagucaaagagggaggggccucguggugcugcuuccagcucacuc

SEQ ID NO: 4194444 - RNA, 68 nt, Human
gagguggguggaucaccuaaggucaggaguuugagacaagccuggccaacguggugaaaccccaucuc

SEQ ID NO: 4194445 - RNA, 75 nt, Human
gaggugguauuuauaguggugcuuaguguaggcucuggaacuaggcugcuggcuaugaaucccauuaugccacuc

SEQ ID NO: 4194446 - RNA, 74 nt, Human
gagguguccucuuucagagaucucaacgccaacuucgugggaccucucuugagagagcagagcauuaggcccuc

SEQ ID NO: 4194447 - RNA, 97 nt, Human
gagguguuacccacacagcccgcccugaacuuucgggucuccuaaaggaacccacgacgagucaucagggcgacuggaaguggcuggacagcgccuc

SEQ ID NO: 4194448 - RNA, 115 nt, Human
gagguuaaaauacugcuuaaaaagggaaacacucaauuuaguaauucgguugccuagaugaaaucgaguggcuauugauccgugauguuucuagauuuuuaagacuauguacuuc

SEQ ID NO: 4194449 - RNA, 88 nt, Human
gagguuagggggcaagauucugugaaugccuacccugugcugcauccucagcugggcacugucccauaggcucuuuaguccccaccuc

SEQ ID NO: 4194450 - RNA, 82 nt, Human
gagguucagaggaggugaggaugccuuaugacuugugauuuacugggcaauuacuaggccaguuuucacuuuagccaaccuu

SEQ ID NO: 4194451 - RNA, 95 nt, Human
gagguucauggcauguucguugcauguuuucuugucuggagaaguguuggaauaagaaacacuggggcaggaaaguaugcuguacuuugaauuuu

SEQ ID NO: 4194452 - RNA, 73 nt, Human
gagguucuacuggcauuuaguggguagaggacaaggauggcacuaaauauccuacaaugcacaggagagccuc

SEQ ID NO: 4194453 - RNA, 70 nt, Human
gagguucuuagagccaggacugugucucacucaccucugcaucucuagugagugucuggugcagggccuc

SEQ ID NO: 4194454 - RNA, 75 nt, Human
gagguugaaagaagagugccagauggaccucuuggucuuuguggugggaucaggaaauugguacuuuuuucccuc

SEQ ID NO: 4194455 - RNA, 91 nt, Human
gagguuggaauguuuucccuuuuuuacgagaggaaauugagucacaguaagaauaaaugccucucugggagccaggaugacacucgaccuc

SEQ ID NO: 4194456 - RNA, 77 nt, Human
gagguuuacagccagugacuggacaagcuuaucuaggucuucaguguagcugucucccucacauggcugugaagguc

SEQ ID NO: 4194457 - RNA, 56 nt, Human
gagguuucacuguguuguccaggcuggucuugaccucuugggcucaagugauccuc

SEQ ID NO: 4194458 - RNA, 56 nt, Human
gaguaaaauaauccuccucucuuacugaauauuaagagaggaggauuauuuuauuc

SEQ ID NO: 4194459 - RNA, 58 nt, Human
gaguaaaugacaaaauagacuaagaaaacaucaucuaguuauguuauguuguuuacuc

SEQ ID NO: 4194460 - RNA, 90 nt, Human
gauccaggcuuaugacccagagcacugggugugggcgcgagaucgcgcucgccuuuccuagagcuccagggaccguggaggccugagguc

SEQ ID NO: 4194461 - RNA, 76 nt, Human
gauccccuuccaagucuggaaaaugcauguuucauuauuuagaaugauuuaaauguuauuucuaggccugaagauc

SEQ ID NO: 4194462 - RNA, 66 nt, Human
gauccccuugagccagggagcuggcagacacugagggugcugcccugccuaugggucgaggguuuu

SEQ ID NO: 4194463 - RNA, 83 nt, Human
gaucccuggagagcaguggggguggugugaguguuugugcugagcauggaaauuggcauggccuugugcuccuucucaaaguc

SEQ ID NO: 4194464 - RNA, 59 nt, Human
gauccggugccagagugggaucaguucucucagcucuggucccauccuggcuucauguc

SEQ ID NO: 4194465 - RNA, 79 nt, Human
gauccuaacuauguuucaaagucagccaucuggcuaucucaugauaugucaguugcuuuuugaaugcuaguucccaauc

SEQ ID NO: 4194466 - RNA, 81 nt, Human
gauccuauagaccaguuuagguacuaggcucuagguuacaacccuagaagguugguacuaagccaggguuuuguaggcauu

SEQ ID NO: 4194467 - RNA, 58 nt, Human
gauccuccagcugacccaggaccccacaaccccuccagucccaagggcugagaggauc

SEQ ID NO: 4194468 - RNA, 73 nt, Human
gauccugcuggcagggacagacagauauauuuggguuuggaacuaauaacuuguuucuguuuuugcacugauc

SEQ ID NO: 4194469 - RNA, 90 nt, Human
gauccuugaagucuuucuugguauucugagcuaaauauuuuauagaaauugggguagcuaaaaaguaucaggaaaacuagcuucaaaauc

SEQ ID NO: 4194470 - RNA, 80 nt, Human
gauccuugggacagugacuaucugauuuaagggguccauugauaguggacucauauccaugaagguacuucucagggguu

SEQ ID NO: 4194471 - RNA, 92 nt, Human
gaucguguaucucuucucugugucccagcucucagcuugauuaagaggucagaaggaggcuucugcagcaugaggcuggagcacacaugauc

SEQ ID NO: 4194472 - RNA, 112 nt, Human
gaucuaacgccuauucuaaucacucuaccuuagcaggaaauugaauaaggguugugggauccuuagcuuacaagucuucuggugacucugauuaaaauuaagagguuggauu

SEQ ID NO: 4194473 - RNA, 70 nt, Human
gaucuaaugaccggucauacaagcagauacaacggugcugucagggcucagugggauaggucagaugguc

SEQ ID NO: 4194474 - RNA, 74 nt, Human
gaucuaauuuucacucauuugcuaaaaaauugcuagacaaaauucaguaaggcaacuugguugaaauuagaguc

SEQ ID NO: 4194475 - RNA, 62 nt, Human
gaucuagaccugcaguuugaaccuuacuuuugaggcgaggaggcugaacuagggucugguuc

SEQ ID NO: 4194476 - RNA, 61 nt, Human
gaucuaucaugccauugcuuuuucuuaaugauauugggaagaagcaggaguguguagcauc

SEQ ID NO: 4194477 - RNA, 62 nt, Human
gaucuauccaaauguuuacuucuggauauagcauauauuuauccuguaagcuuggguggcuc

SEQ ID NO: 4194478 - RNA, 84 nt, Human
gaucucauccccaguaccuguggcuuguuggauggaagccuuugcuagguuugccaauccacugcagccacagaggaugcuauc

SEQ ID NO: 4194479 - RNA, 96 nt, Human
gaucucccugcuggucaggggauggggcucaggggcccucuccagaaggugacugugccagcuccccuccccagaccucugcagaugaacaggauu

SEQ ID NO: 4194480 - RNA, 74 nt, Human
gaucuccguacgcagggccacugaaagagcaucacguagcaaagcuuuucaggaaauuugugucacaggacguu

SEQ ID NO: 4194481 - RNA, 74 nt, Human
gaucucuaggugaaaaaucaucaugacuugaggauauuauuguuauagaaugguggauuuucugcagagagguu

SEQ ID NO: 4194482 - RNA, 106 nt, Human
gaucucugauugguugugggccaguguggccaggugcugguacuugugcuccagguccuuguacuugcuggccagcugcagcaugucggcugucugguucaggauc

SEQ ID NO: 4194483 - RNA, 62 nt, Human
gaucucuucuucauuuaggaacccugccugcccuaauucugucccugugugggguagagauc

SEQ ID NO: 4194484 - RNA, 57 nt, Human
gaucucuuggucacacaaauguuugauauaauaauuaaauguggagacucaggaguc

SEQ ID NO: 4194485 - RNA, 63 nt, Human
gaucucuuuccauguguguuaaagaacaucucuugugcuaaggagaggcagacacuagagguc

SEQ ID NO: 4194486 - RNA, 108 nt, Human
gaucugaagccagaagacgggccccaggaguaagcccuggauucugaugcagaaguuccuauuuaccuccuuugggacacucacugucuucugagugaauucaguauu

SEQ ID NO: 4194487 - RNA, 105 nt, Human
gaucugggauucagccuggucacugggaguuuuagaagcucuacaggugaugagccuccaaugagcuagguugagacucacuuaccagaaccuggauucuagcuc

SEQ ID NO: 4194488 - RNA, 64 nt, Human
gaucugggcagcacaucaucguauccaccucaugcgguaugaugccaagugcucuacauagauu

SEQ ID NO: 4194489 - RNA, 100 nt, Human
gaucugggguggagaguuuuguagaugucuauuaggucugcuuggugcagagcugaguucaguuucuggauauccuuguuaacuuucugucucauugauc

SEQ ID NO: 4194490 - RNA, 88 nt, Human
gaucuggugucagucccuaaggauaugggcugucccccuaagaugauacauggacacucagaaugucacugagggaccacuggagauc

SEQ ID NO: 4194491 - RNA, 64 nt, Human
gaucugucaucagcaccacaggugcucacucagaacaccuggaagugggugcuauggcaguguc

SEQ ID NO: 4194492 - RNA, 85 nt, Human
gaucuguucccuggcaugauguguucauugaaaacccuguauagaggaguuucacauuagauaugucauuucuuuuuaacagauc

SEQ ID NO: 4194493 - RNA, 67 nt, Human
gaucuuaugguggaugcuggaauagcacaugcagaggaaguauguuauuucaaaauucccuuggauu

SEQ ID NO: 4194494 - RNA, 91 nt, Human
gaucuuccagaaaagaacccagcaugacugauaccuugacuucagccuuaugagauucacagaacuuagucaagcguuccuggauuccauc

SEQ ID NO: 4194495 - RNA, 85 nt, Human
gaucuuuuguuuggucagucuguaaaaacuuuuaaugcuuacaaaaggaauuagaaaauacaugggcuguccuugauaaacaauc

SEQ ID NO: 4194496 - RNA, 81 nt, Human
gaugaaaaguauuuucaaugaguuccacucuguugcuuucauucuucuaauggagugguacuuacuuggcuauucuuuauc

SEQ ID NO: 4194497 - RNA, 87 nt, Human
gaugaaacagucacacaagucauuuucagcaggcuuuaauucucccguagaacuucaguugagaaaggcauggaugccaguuucauc

SEQ ID NO: 4194498 - RNA, 84 nt, Human
gaugaaagcuguggaucccuucagaaaaaugugcaagugcucauaguuuugcauauauuucuaaggagguucaugaauuuuauu

SEQ ID NO: 4194499 - RNA, 73 nt, Human
gaugaaaguugggcuggccagugccaugcagguggaaggacugcuggguggcacugucaccaaugcugucauc

SEQ ID NO: 4194500 - RNA, 69 nt, Human
gaugaaaguuguuagauucuggaaugcuugcauagauguuuuaaccuaugcaguuuaacuaauuuuauc

SEQ ID NO: 4194501 - RNA, 63 nt, Human
gaugaaaugcugagccugaguucucucccagugugggcaauaccugggacucaggguuucauc

SEQ ID NO: 4194502 - RNA, 70 nt, Human
gaugaagacucgggcuagguuauugcccaugggcacacagccagggcuucucccagccaggucuugcauc

SEQ ID NO: 4194503 - RNA, 67 nt, Human
gaugaagagaaugggaugcucuuagauauuuuauggcaaaugaucuaagaauacucauaucuucuuc

SEQ ID NO: 4194504 - RNA, 77 nt, Human
gaugaagauuuuuagaggcauuuuuguuguauauuaugaguaaaauucucuuuggaaaugcuuugagaaucuuaauu

SEQ ID NO: 4194505 - RNA, 68 nt, Human
gaugaagcuuugaagucuaaucuauauuccuuuagccaugguuuuggaauuagacuuuaugcauuauc

SEQ ID NO: 4194506 - RNA, 59 nt, Human
gaugaaggaauacaucaguggcuuugugaaugccaaggcauaugauuguaaccuuuauu

SEQ ID NO: 4194507 - RNA, 56 nt, Human
gaugaaggcugaguggguacggaggcuugacaauagucuucccaccugucuuccuc

SEQ ID NO: 4194508 - RNA, 73 nt, Human
gaugaauaagggauggaggacuguauauaugugcauccaaucuugugccauguuuccauuuucuuguaucauu

SEQ ID NO: 4194509 - RNA, 57 nt, Human
gaugaauaaugacccuaauuaggggaauauccuagucaggauuuuggauuauucguc

SEQ ID NO: 4194510 - RNA, 62 nt, Human
gaugaauccagcaaacagugaggcguagcuugaugaccucagauugcauguucggguucauc

SEQ ID NO: 4194511 - RNA, 102 nt, Human
gaugacugagccagguuuccugucaucagagcguacaccuccaguuagaaagauggacuuguaaacaaaucuaauguaacaugagacuugcuuucggucauc

SEQ ID NO: 4194512 - RNA, 59 nt, Human
gaugacugugugggcuccgaggaccagaacacuggaaucuuggcugugcaugcaucuuc

SEQ ID NO: 4194513 - RNA, 57 nt, Human
gaugagaaggcucagauccaaaggccaacauaguuuucuguuuccugccuucccauu

SEQ ID NO: 4194514 - RNA, 56 nt, Human
gaugaggcagcugcuggagaacgucaaagggugggggcguggcaagcauguucauc

SEQ ID NO: 4194515 - RNA, 60 nt, Human
gaugaggcauaaacacagucacaggccucagccuccaccugggacugucccauccucauc

SEQ ID NO: 4194516 - RNA, 73 nt, Human
gaugaggcucugugggugaguagaaucuuugcuacuuguagauggauuuuguuucucucucacaagaccuuuc

SEQ ID NO: 4194517 - RNA, 86 nt, Human
gaugagggaagauacagggaguaauuuugaacuguagugaguuuugaucaacuaaaauuaucaagauaauuccuuuuucucuuguc

SEQ ID NO: 4194518 - RNA, 59 nt, Human
gaugaggugaaaaguggauggagaggcucagacucaccaacuacaguuguuccuucauu

SEQ ID NO: 4194519 - RNA, 72 nt, Human
gaugagugccugacaguguacacugacagcucacuaaaggguugucauuauuacuauugucauuguuuucuc

SEQ ID NO: 4194520 - RNA, 69 nt, Human
gaugaugacuuuggagcacugccugccucucuuuuugccaagauucaaggagaguguuuccuuaucauu

SEQ ID NO: 4194521 - RNA, 78 nt, Human
gaugaugugggucuuaucacacgguagacauugugaccuucagaaguuuacauaagugaugaugauaccucuaacauu

SEQ ID NO: 4194522 - RNA, 55 nt, Human
gaugauuaaaaucagaugccuaaaaucugacuuuaggcauuagauuuuaaauguc

SEQ ID NO: 4194523 - RNA, 57 nt, Human
gaugauuguugcugcccaaugaugagccaacucuccugccagcauuaaacagucauu

SEQ ID NO: 4194524 - RNA, 66 nt, Human
gaugcaaagaggaccuucaguaacuauuucuaaaauuguuaaauaauuggguucuuuucauguguc

SEQ ID NO: 4194525 - RNA, 80 nt, Human
gagggagggaggagaggagaaagacaacuuuguuucauuuuuuagugaggcagcccacuuuccuuaguuucccuaccuuc

SEQ ID NO: 4194526 - RNA, 65 nt, Human
gagggagucagcaggguccccuugagugguggguaacccuaagauggucuuguuggcuaacccuu

SEQ ID NO: 4194527 - RNA, 57 nt, Human
gagggagugacucaagaguugcacaucccaagagacagcccuuaagagucaucccuc

SEQ ID NO: 4194528 - RNA, 55 nt, Human
gagggagugcuuucugauaguuguuuacuggccucuuaccagaaacugcucccuc

SEQ ID NO: 4194529 - RNA, 92 nt, Human
gagggaguggaacauauaaacuggaaagucaguucugagcaccuuggccucauugcucuugaacuuucuaguuucauguuguugcaucucuu

SEQ ID NO: 4194530 - RNA, 55 nt, Human
gagggaugguaguugacacugaagcaccacacuuuggauuaacugauguucucuc

SEQ ID NO: 4194531 - RNA, 67 nt, Human
gagggauuauuguguccauuugagucaugugguuauaccuacauuuucuaggggaccaagaucuuuu

SEQ ID NO: 4194532 - RNA, 65 nt, Human
gagggauuguagcaagcuuguaaguucaaggauuucuuggcacugccaaccugcuagguucucuc

SEQ ID NO: 4194533 - RNA, 84 nt, Human
gagggcaacaucuuugucacugccacaggcuguguugacaucauccuuggccagcacuuugagcagaugaaggaugaugcuauc

SEQ ID NO: 4194534 - RNA, 65 nt, Human
gagggcacagccuaaagccuaugggagacaggagcuauggaucuauaaguaggggccugacccuc

SEQ ID NO: 4194535 - RNA, 63 nt, Human
gcagcacuuggucaauauccagccucaucucucccaucuugaggagggucugacaaguguagc

SEQ ID NO: 4194536 - RNA, 57 nt, Human
gcagcagaaggccaaggggagcccuagagaaucagcugcccuuugucaccauguugc

SEQ ID NO: 4194537 - RNA, 73 nt, Human
gcagcagaaguccguguccccaggcaguagcaggccuagagcuucacagugccagggggcaggcugucguugc

SEQ ID NO: 4194538 - RNA, 76 nt, Human
gcagcagaauuuuauguuaauggauucgguggaaaauacggcuuuaaugaaacauugacuaugauuacucuguugu

SEQ ID NO: 4194539 - RNA, 91 nt, Human
gcagcagaccuuguuuaauguuucccuggcuuccuucccucuguuuucagucucuggggaggaguggaaaggaaggacaaucucaugcugc

SEQ ID NO: 4194540 - RNA, 65 nt, Human
gcagcagcaggcgcacggccgucuggaucucccuggaggugauggucgagcgcuuguuguaaugc

SEQ ID NO: 4194541 - RNA, 62 nt, Human
gcagcagcaggcgcacggccgucuggaucuccgggacgugaugguggagcgcuuguuguagu

SEQ ID NO: 4194542 - RNA, 76 nt, Human
gcagcagcaguucagcagcaaaucuagaagaggaggggaaaauccugugccgacauauuuuucugucuguugcugc

SEQ ID NO: 4194543 - RNA, 69 nt, Human
gcagcagcuccugccaugagugcugaauuugauguaugauuaaggcagcucacgggcauggggugcugu

SEQ ID NO: 4194544 - RNA, 60 nt, Human
gcagcagcucugaaugggccccugaggcugcacaggggccuuugucacuggggcgcaugc

SEQ ID NO: 4194545 - RNA, 60 nt, Human
gcagcaggagaguuuguccugccaguguucugaggcuggcauggcaccuauuccagcugc

SEQ ID NO: 4194546 - RNA, 60 nt, Human
gcagcaggcuuuucauaccuugagucuuacuuaauguucacaugaaaaagcaacugcugu

SEQ ID NO: 4194547 - RNA, 76 nt, Human
gcagcagucauugucuuuagccagcagucuucuccugggaagggccagcagaaguguggucuagcaguggcgcugc

SEQ ID NO: 4194548 - RNA, 64 nt, Human
gcagcaguuuucccuuuaacuguucauauauaaaacauucucaguugaauauacuugcuguugc

SEQ ID NO: 4194549 - RNA, 83 nt, Human
gcagcaugugguugaagguuauuacuuaugaguuuaaaauaauagcugaugagccgugguuaucuuuaaggcuacuaagcugc

SEQ ID NO: 4194550 - RNA, 72 nt, Human
gcagcauuccuucuggaagcuucaggggagaauuuguuuccuugucuuuuauagcuuccagaggcugccugc

SEQ ID NO: 4194551 - RNA, 59 nt, Human
gcagcauugugagguccugcccagugugguaaugggcaguuagcuugucacaguccugu

SEQ ID NO: 4194552 - RNA, 81 nt, Human
gcagccacaccugguucuagugaaagucuauacaucaccugcagaucuggggcuuugagcuagauauaguaccuggcaugc

SEQ ID NO: 4194553 - RNA, 64 nt, Human
gcagccagagcauccauuuuugucacauaucauauggagagagaaggcuugcugucaggcuugu

SEQ ID NO: 4194554 - RNA, 85 nt, Human
gcagccaugguguuuaguuucugucucucugaggaaggagcuuuacuggcuuaaucagaaacagaaacuaagaacccaugacugu

SEQ ID NO: 4194555 - RNA, 73 nt, Human
gcagcccaagcugaccugcugggcuaguggcccugucccgggagcgcucacaggcaguguugggagagacugc

SEQ ID NO: 4194556 - RNA, 55 nt, Human
gcagcccaggcucgcucacugcaucuuucccuggcagaggggcuagccuggcugc

SEQ ID NO: 4194557 - RNA, 60 nt, Human
gcagcccccauggggaggucaagggucugcccugcccuugggccagcccagggggcaugc

SEQ ID NO: 4194558 - RNA, 62 nt, Human
gcagcccuccucacaucagcguccugggagccuccgcccagggggccggcagaggaggcugu

SEQ ID NO: 4194559 - RNA, 67 nt, Human
gcagccgccggguaugcuguucaggaugguaucacucaccucuugggauuugcaggcucagcgcugc

SEQ ID NO: 4194560 - RNA, 88 nt, Human
gcagccgcuguucauugaggcacuccaggaugcuguugccgaaguucgggaucuccaucugcagugucugggccauggcagcggcugc

SEQ ID NO: 4194561 - RNA, 89 nt, Human
gcagccggaucauaaggaacaaagacagguggugucuggggagucccuguccaggcuuuuucaugcugucucccuccugugaggcuugc

SEQ ID NO: 4194562 - RNA, 91 nt, Human
gcagccucagacuugcaguggguagaggacugaaaccccaagcagccuccucugggcucccugcaacagucugagcccugagagcagcugu

SEQ ID NO: 4194563 - RNA, 57 nt, Human
gcagccucagaggggagauauauucaauaggauuauuuccuugcuuugaggaaaggc

SEQ ID NO: 4194564 - RNA, 71 nt, Human
gcagccuccggcggccggccugagcccgggaugccuccuccucggccuccuccagcugccgcuucagcugc

SEQ ID NO: 4194565 - RNA, 55 nt, Human
gcagccuguguccauacuccuccagccaacaaucugaacaugaggcauaggcugc

SEQ ID NO: 4194566 - RNA, 86 nt, Human
gcagccuucugggccagaucuagggaucuucccucccucccugcacucuagcugcaggagcuuccuggugucugcccagagcuugc

SEQ ID NO: 4194567 - RNA, 84 nt, Human
gcagccuuggagccccaugugcucuuauuacccugucgcacagaagugaugcacagagagaugagacacguggcuuccgguugc

SEQ ID NO: 4194568 - RNA, 114 nt, Human
gcagcgagagggccccgaggaaaccugacccccaccuugcaauuguucccugagguccaggucugagggagcauagagaguggguggcccagggcuccagcugccccucccugc

SEQ ID NO: 4194569 - RNA, 55 nt, Human
gcagcgcuacucacagcucugaaaucgauccagagcauuccacagugagcguugc

SEQ ID NO: 4194570 - RNA, 77 nt, Human
gcagcggacccugagggagcugcuggccuuggagccggguguggccuaccagcacgccuuccucuacauccgccagc

SEQ ID NO: 4194571 - RNA, 74 nt, Human
gcagcggggugggaauagaccugucuaugcaguagaaacaaaccagacauggauccuguucuuacuaacgaugu

SEQ ID NO: 4194572 - RNA, 76 nt, Human
gcagcggugcaggagcggggugcucgguggacucuggaccugcucuuggggcugcuggcccccuucuugcccgugu

SEQ ID NO: 4194573 - RNA, 73 nt, Human
gcagcggugggagguagggggaggaaccgaggcucggucugagaugugcugccucugccaccucccacgaggc

SEQ ID NO: 4194574 - RNA, 70 nt, Human
gcagcuacaagacagccugaaauguacccacccugaccugggugagccacaggaguugucuguuggaugc

SEQ ID NO: 4194575 - RNA, 56 nt, Human
gcagcucacacagcaaguuuuggcaaaaaccaaugucuuacuucucgcugggcugc

SEQ ID NO: 4194576 - RNA, 75 nt, Human
gcagcucacagucuccgccaucccagccuccaaaagggaagagacccagauguggggacucugagagaauucugc

SEQ ID NO: 4194577 - RNA, 92 nt, Human
gcagcucagacugguggguaaaaccuuggaaauuugaaauaagacaacucaggauaguagcccagguauuuaaaccacugugugaccucugc

SEQ ID NO: 4194578 - RNA, 55 nt, Human
gcagcuccaagguauccaccagggucucucugacucagugagggccuugggcugc

SEQ ID NO: 4194579 - RNA, 74 nt, Human
gcagcuccaggcaggugggcugcccuugaggucagccuggguguuuccaggggggcuaccgucucuggagcugu

SEQ ID NO: 4194580 - RNA, 55 nt, Human
gcagcuccuggcacaguuuuuuccagccuaauuggguaaaaugacaggcagcugc

SEQ ID NO: 4194581 - RNA, 69 nt, Human
gcagcugauggaaguccuauuggcagacagccuucucucaucagccccuucaggacuugccucaguugc

SEQ ID NO: 4194582 - RNA, 55 nt, Human
gcagcugcaauaggcaucaagcuaugaaaagcucugaggagcacuauugcagugc

SEQ ID NO: 4194583 - RNA, 67 nt, Human
gcagcugcagguggucccaugcccugugccagacuguguugaggcauggggaggccuggaggcuugc

SEQ ID NO: 4194584 - RNA, 55 nt, Human
gcagcugccuccauggucaaagauggugacaaccaaugggaagcuggcgagcagc

SEQ ID NO: 4194585 - RNA, 85 nt, Human
gcagcugccuugggcuugcuaggaccccugccuggguuuucuggggaccgagaggcccuggucaggucuggcuggaggcagaugc

SEQ ID NO: 4194586 - RNA, 61 nt, Human
gcagcugcgcugguguggggcaugagagcgagguggcuccaggucuccgcggagcagcugc

SEQ ID NO: 4194587 - RNA, 55 nt, Human
gcagcugcuguggcaucaagcucugcgugggcaccaucugacuucacacagcugc

SEQ ID NO: 4194588 - RNA, 61 nt, Human
gaugcaagaacgaauccuacuugcuuacaucaagguguuagcagacuuuuguauuuguauu

SEQ ID NO: 4194589 - RNA, 74 nt, Human
gaugcacggcuucccaaguaaauuuguauuuuggaccagauaaugcuuugcuaugggagacuggccuguacauc

SEQ ID NO: 4194590 - RNA, 82 nt, Human
gaugcagaauuauuuuugcaauauguuccugaauauguaauauaaguguauugggaucauuuugcauccauaguuuuguauc

SEQ ID NO: 4194591 - RNA, 61 nt, Human
gaugcagcacuugccuuacgagcuguucuuucuugcucauugagggcuuugugugcugcuc

SEQ ID NO: 4194592 - RNA, 80 nt, Human
gaugcaggccgguuggaguggacgucauugccgggaacgagcgagucgccgcugcagcccuagugacugcggccugcauc

SEQ ID NO: 4194593 - RNA, 94 nt, Human
gaugcauacuugaaaucuuccaauggucacaucaaucugaaaucacugauuaauucuaaauggugugccauauggagcuuuccuguccuguguc

SEQ ID NO: 4194594 - RNA, 65 nt, Human
gaugccacuuggaagggaaccgaguuugcugauuuaguacguauucuuuucccuuuuuuagcauc

SEQ ID NO: 4194595 - RNA, 75 nt, Human
gaugcccacagucagggcccagauguucacaugcuuggcgguggaggcauaggccugggcccuguucaggucguc

SEQ ID NO: 4194596 - RNA, 79 nt, Human
gaugccuaaggccagaauuauaaaauguuuuauguuguuuuaaaaacauauguauuucucauaauuagguuucggcauc

SEQ ID NO: 4194597 - RNA, 79 nt, Human
gaugccuaugaacucugcaaagcuaugucacacaaagacaucuagcaugacaagcuuuacagaauugaauggaugcauu

SEQ ID NO: 4194598 - RNA, 65 nt, Human
gaugccucuuuuggcugaauuauauccaccauaccaucacucuggugagcaaaaagagaagcauu

SEQ ID NO: 4194599 - RNA, 62 nt, Human
gaugccuggaagacucaauggccugccugaacugcagauaguguccauaaguguuccuauuc

SEQ ID NO: 4194600 - RNA, 69 nt, Human
gaugcgacaagagaggcaagggcugcagucugaguucuaggcuccagcccuggcucuucaccugguguc

SEQ ID NO: 4194601 - RNA, 85 nt, Human
gaugcgcaucagccccgggggcucugugucucgggggcucccaggucggaaucccucucucuaucgggccccagggguuugcauc

SEQ ID NO: 4194602 - RNA, 58 nt, Human
gaugcgcuguggacuggugagguguccaggaccucccucuuucagucccacaguuuuc

SEQ ID NO: 4194603 - RNA, 74 nt, Human
gaugcuagcuuuaagaugagauguggauaacuuuauuccuuccauuauccccacucucuccuggagcuuccauc

SEQ ID NO: 4194604 - RNA, 68 nt, Human
gaugcuauauggggcagccauggcuccaaucaugagguagggacacacuggcugugcccauagagcuc

SEQ ID NO: 4194605 - RNA, 86 nt, Human
gaugcuauuuuugaggugcagcuuaaaggcugccuuguggccccuacauaaucugcugccacucugagcuugcuucaaaauagauc

SEQ ID NO: 4194606 - RNA, 79 nt, Human
gaugcucugcauucugacuuaguuaauaugaccucugaaauuguaaaucacaugaugcuauagucugaauguuuguguc

SEQ ID NO: 4194607 - RNA, 61 nt, Human
gaugcugcugauggcaccuaggcagaagucccaaaggacaccuguugccccuucacagauc

SEQ ID NO: 4194608 - RNA, 64 nt, Human
gaugcuguacuuggcuuuggaaaacacaggggucuggccugugagcugcucaggucagucuguc

SEQ ID NO: 4194609 - RNA, 65 nt, Human
gaugcugugugcuaggauauguuuuuagaguuucaucucuaaaggcaacugaaaguagacagcuc

SEQ ID NO: 4194610 - RNA, 62 nt, Human
gaugcuucccugcucugcacaccucaguaaccaaggcugugacuacgcagggaagauucauc

SEQ ID NO: 4194611 - RNA, 104 nt, Human
gaugcuugagauccauugugcuuuggaacagaauccucuuagcaucccuaccauaagcucagaugaaagaugauuuaaaguacugugguuggcuaacaugcauu

SEQ ID NO: 4194612 - RNA, 76 nt, Human
gcaugaggacggggagcgucggccucucccacucugcgguggagucgggggcgccgccgcucaucucaccuccugc

SEQ ID NO: 4194613 - RNA, 88 nt, Human
gcaugaguaagucaggguugucaguguuucagguggcuugggagucauucuuuccagacacugauugcccagcuugaagcuacucugc

SEQ ID NO: 4194614 - RNA, 75 nt, Human
gcaugaguggcuucaauggguuagugagucagagaagggucuguauggucacugacguggggcuacuugagaugu

SEQ ID NO: 4194615 - RNA, 64 nt, Human
gcaugauagcuaacuccccucacuggaaguacucagaaucccaggggagauggcuguugagugc

SEQ ID NO: 4194616 - RNA, 111 nt, Human
gcaugauauuuauccuuccuuuggggaaucacagaauggaccaguuuuagaaacuuggaaccccauccuagauuuuuccauguguuucuucaugggaggguggaugggugu

SEQ ID NO: 4194617 - RNA, 66 nt, Human
gcaugcagcagcucagaggcaccagggccugccugcagugccaggugcauggcugagucuccaugc

SEQ ID NO: 4194618 - RNA, 60 nt, Human
gcaugcagggagggucuggcuguucucuagccucaccgaggccuuucacugcaucucagc

SEQ ID NO: 4194619 - RNA, 60 nt, Human
gcaugcagugcaauucaauguaguucuuagagagugacauggagcacugugccugcaugu

SEQ ID NO: 4194620 - RNA, 67 nt, Human
gcaugcaucucccagguuacaucugagccuggagucgccaggcuucaaggaccugagggaagcuugu

SEQ ID NO: 4194621 - RNA, 58 nt, Human
gcaugcaugguuugugacuguggguuuguguuuuuguggucuuuguggcugugugugu

SEQ ID NO: 4194622 - RNA, 64 nt, Human
gcaugcgggccugggcuuggcagggucccaucauucuuuuuucugcagccauucagcccuaugc

SEQ ID NO: 4194623 - RNA, 69 nt, Human
gcaugcuaacaaaugucuguaugagaaagagaagaggcuggggcugucucuucucacaucagaagcugc

SEQ ID NO: 4194624 - RNA, 67 nt, Human
gcaugcuguacaacuggcugggcuuucuuauauuucuuguaacuaauuagucucaguguacagaggc

SEQ ID NO: 4194625 - RNA, 56 nt, Human
gcauggaaccugccaguccaggcuccuuucuggauggaacacuggcuuuccacugu

SEQ ID NO: 4194626 - RNA, 79 nt, Human
gcauggaacugagucuggcacgcuuuaaaucuccggggauuuuggcugaugaggaaugcucagcucaauguuuccaugu

SEQ ID NO: 4194627 - RNA, 65 nt, Human
gcauggaauaauuguuucacagaagagggaccuucuucagucagguaauuguuucauuuuauugc

SEQ ID NO: 4194628 - RNA, 69 nt, Human
gcauggagugucuauugggguaaagaaagagcaaggucauucguucuuaacucaaauauauauccaugu

SEQ ID NO: 4194629 - RNA, 75 nt, Human
gcauggauuucuugaauauuuccauuuacuauguagcaaaccccuucagcaccaucguaauguggaaguacaugc

SEQ ID NO: 4194630 - RNA, 59 nt, Human
gcauggcaagacccugucucuacaaaaaagacaaaaguuagcuaggguugguggcgugc

SEQ ID NO: 4194631 - RNA, 74 nt, Human
gcauggcacgggcaggccggcugugcugggggaccuggcgccccccucugcagcugcuggcccaggugcuaagc

SEQ ID NO: 4194632 - RNA, 90 nt, Human
gcauggcaugagauaacugucagcagauuucuggaauucacauaaauggcauccaaaggaagaggcugucagucaucaggucaucugugu

SEQ ID NO: 4194633 - RNA, 79 nt, Human
gcaugggccauaaacggauuuaagaggcugcuagaguauagaauuuaauauaguuagcaucauuaaauaguggcacagc

SEQ ID NO: 4194634 - RNA, 127 nt, Human
gcaugggggucucugcaaagccugucuucugccccuucccugacacauuucucccagucuccaugcugccugggauggagauggaaaugaagggaagccccgcaguagaagaggccaggcucccugu

SEQ ID NO: 4194635 - RNA, 63 nt, Human
gcaugggguccuggcagucuuugguugucugcuaguagauccaugagucaggaccuacauugc

SEQ ID NO: 4194636 - RNA, 71 nt, Human
gcauggggugcagccuuuguuucuacuugguauguuaauuuacauaagcacagauugcugcauccauaugc

SEQ ID NO: 4194637 - RNA, 71 nt, Human
gcaugggucaauggcucuagaggguuguguugggcaaccugcagcuucagccagagggccagggacagugc

SEQ ID NO: 4194638 - RNA, 74 nt, Human
gcauggguucaucuuuggacauguugagguugcagugccugucaacugggaaugucaagagaacgauuguaugu

SEQ ID NO: 4194639 - RNA, 73 nt, Human
gcaugguggugccuaagacacugacuccaauuuuccagugagaacaggaaggcuuuaagcaccaaagccaugc

SEQ ID NO: 4194640 - RNA, 97 nt, Human
gcaugguucugguaaaguuccagaacuggaaaaggacuuucuaaaucaucaggccuaccgucuauucuggaacguaagaccaccuaagaacuauagc

SEQ ID NO: 4194641 - RNA, 65 nt, Human
gcauguacacauagguuacugauuaauaauaauaguguuuauuggguacuuacugugugccaugu

SEQ ID NO: 4194642 - RNA, 81 nt, Human
gcauguacauguuuuauguguguacaugcauauguguauauuauguaugcauguguacauaugguauagauaugugggugu

SEQ ID NO: 4194643 - RNA, 57 nt, Human
gcauguaggggacccagcaagugaguggcagccgcugccaggauccccugccggugc

SEQ ID NO: 4194644 - RNA, 64 nt, Human
gcaugucuaucauuguguuugccagucaccuagcuggugagggauacugauagaaugagcaugc

SEQ ID NO: 4194645 - RNA, 74 nt, Human
gcaugucugcgugcaugucugcgugcaugucagggugcauguccgggugcaugucggggugcaugucaggaugc

SEQ ID NO: 4194646 - RNA, 105 nt, Human
gcaugucugggaggcugcugguggucccuucuggcccuggucauacaugcagacuguggccagguuggaguuggccuuuaggguccccagcuccuugccccaugu

SEQ ID NO: 4194647 - RNA, 88 nt, Human
gcaugugaacauuugggcuaagucuccuucaugauacugucaguaucaugcaauaaggugaggccuacugaguguuuucuaagcgugc

SEQ ID NO: 4194648 - RNA, 86 nt, Human
gcaugugaacugggagggucuugaagaggguacccagccucggggucccggcaccuccuuaacucucccggcucuuuuccacgugu

SEQ ID NO: 4194649 - RNA, 60 nt, Human
gcaugugacucuggcuuacccccuguaauucagagaccugaagccaggguccagacaugu

SEQ ID NO: 4194650 - RNA, 78 nt, Human
gcaugugauauugcacucuucaauggcuuagccccagcuuuuuuccaggccagcugucuaagagaguaaaacaggugc

SEQ ID NO: 4194651 - RNA, 88 nt, Human
gcaugugauauuugaagaaaacuaaauaaaaccucuccuccugccuucgggguaaaauuagguaaucuuuagauacaccacauaaugc

SEQ ID NO: 4194652 - RNA, 72 nt, Human
gcaugugcacuccugggagccaaggaaggcuguucaucguguccuuggaagagcauucccagggugcuuggu

SEQ ID NO: 4194653 - RNA, 94 nt, Human
gcauguguauacaaccugcauguucugcacauguauguaacaaaccugcauguucugcacguguguuuaacaaaccugcauguucugcacaugu

SEQ ID NO: 4194654 - RNA, 55 nt, Human
gcaugugugagaccuuuuagcauuaucaaagauuuuguggagucugcauaugugc

SEQ ID NO: 4194655 - RNA, 68 nt, Human
gcauguguuagagugugcaugcgggccguggggccucacagcaugugugugcacaaucuggcgugugc

SEQ ID NO: 4194656 - RNA, 106 nt, Human
gcauguucaaaacuuucaaaaagacucuggaugauggcuuuuuucccuucaucauccuggaugccaucaaugacagaguuaggcauuuugaccaguuuuggagugc

SEQ ID NO: 4194657 - RNA, 68 nt, Human
gcauguugaagaccuuuagugcuaugugggccuaaacccaguaugacccacuugucuuccacaccagc

SEQ ID NO: 4194658 - RNA, 71 nt, Human
gcauuaaaaacuagucacugcaggaagaccuuaugcagggcauguguaggaauuccagugacuucagaugu

SEQ ID NO: 4194659 - RNA, 68 nt, Human
gcauuaaaaucaucuucaucuuacacagacagaaagugaugucuguaagggaaggugauuugcacugu

SEQ ID NO: 4194660 - RNA, 76 nt, Human
gcauuaacaggcagcaugggccccagcuccuucaagcagagcaaggagagaggagcccacugcuguugaauggugc

SEQ ID NO: 4194661 - RNA, 70 nt, Human
gcauuacaggaaaauaugggcuggguaugagcuggugcucuccagcacagcugcaugaugguccagaugc

SEQ ID NO: 4194662 - RNA, 105 nt, Human
gcauuacucaucuuguuaugaguaccuguuccgauaaaguucaacugaaaauaagagacagaaaaugaacaaaugaaucaguguagcucaaacaagauaaaaugc

SEQ ID NO: 4194663 - RNA, 57 nt, Human
gcauuacuggcccacagagguuuugagccaaucagcucugagacuggguuagaaugu

SEQ ID NO: 4194664 - RNA, 55 nt, Human
gcauuagagcccaucaccuguaaccaagcgaaaggagacauugauggcuuuaagc

SEQ ID NO: 4194665 - RNA, 88 nt, Human
gcauuagauucuuauaggagugcaaacuuuauugugaccuucacaugugagggaucuagguugugcacuccuuauaagaaucuaaugc

SEQ ID NO: 4194666 - RNA, 64 nt, Human
gcauuagccugagagccaagcugugcagcagauggcuuauggcuaaggcuugucaggucuuugc

SEQ ID NO: 4194667 - RNA, 79 nt, Human
gcauuagcugucuucuaguaggccaagaagcuccccaagcaacacaaggagcuuugucccuguuggaaaugcagagugc

SEQ ID NO: 4194668 - RNA, 71 nt, Human
gcauuaguucuuagcagacacagccaccaccgggaauuguuugguccugcuugcugcuuaagaaaaucugc

SEQ ID NO: 4194669 - RNA, 113 nt, Human
gcauuauaccucuauuagguuggugcaaaaguaauugcgguuuucacaauuauacuuuuaauugugaaaaccgcaauuacuuuugcaccaaccuaauauaucuguguuaaugu

SEQ ID NO: 4194670 - RNA, 92 nt, Human
gcauuaucuggaaaaggggaauggguagacuguugaauucaggcaccugaccucauguucacuucguaaaccccucccauuuccaauguugc

SEQ ID NO: 4194671 - RNA, 74 nt, Human
gauuugacacagugacguuuauuugagacgcauuauauaugcagucagagcgaugaauucauucuguuuauauc

SEQ ID NO: 4194672 - RNA, 130 nt, Human
gauuugacuuauagagauccaugaacucugcuugacaacuuuuauuugcuuugucaugaacaggaaucauuuccuggcuacagguaaaauuaucagaaacagaggcucuguggucucuugauggaaauuc

SEQ ID NO: 4194673 - RNA, 65 nt, Human
gauuugagcuacaauaccuccuguuuauugauucacagauagacaaggugauaauagcuucuguc

SEQ ID NO: 4194674 - RNA, 77 nt, Human
gauuugcaaaucagguggucaggcagaugggcuguggguucuaugaacagccaucgccagaucaaugaaaugcuuuc

SEQ ID NO: 4194675 - RNA, 55 nt, Human
gauuugcagggcugccaaaugacugucaucauggcuaaccaaggccugauaaauc

SEQ ID NO: 4194676 - RNA, 77 nt, Human
gauuugcuugaacccaggagguggaggcugcagugauccgagaucacaccacugcacuccagccugggggacagauc

SEQ ID NO: 4194677 - RNA, 97 nt, Human
gauuuggcucucuguuugucuguuauugguguauaagaaugcuugugauucuugcacauugauuuuguauccugagacuuugcugaaguugccuauc

SEQ ID NO: 4194678 - RNA, 116 nt, Human
gauuugggggaagcugauaucugcucaccucuuugggucuuuucuuucucccagcauggggcucucaugagugugugguaaauaaagcaccuaauccuaccucauucccccaauuc

SEQ ID NO: 4194679 - RNA, 100 nt, Human
gauuugggguggagaguucuguagaugucuauuaggucugcuuggugcagagcugaguucaauuccuggauauccuuguuaacuuucugucucauugauc

SEQ ID NO: 4194680 - RNA, 100 nt, Human
gauuugggguggagaguucuguagaugucuauuaggucugcuuggugcagagcugaguucaauuccuggauauccuuguuaacuuucugucucguugauc

SEQ ID NO: 4194681 - RNA, 100 nt, Human
gauuugggguggagaguucuguaggugucuauuagaucugguuggugcagagcugaguucaauuccuggauauccuuguuaacuuucugucucauugauc

SEQ ID NO: 4194682 - RNA, 61 nt, Human
gauuugugaaggagcuuccucuauuugggaaguccccagccagggaaacuuuuucuuaauc

SEQ ID NO: 4194683 - RNA, 70 nt, Human
gauuuuaauauucuuaauugcugagcugaauguuuaucacauuuagcagcaaauaaguagugcuaaaauc

SEQ ID NO: 4194684 - RNA, 116 nt, Human
gauuuuacucagauggaaaggacaauagaaggaaacugacauaaauaggauugaaucccacauuucuaaauauggaacaauuuccauuuuguuuuguuuuucuauaacagaugauc

SEQ ID NO: 4194685 - RNA, 66 nt, Human
gcauuuuaagaugaccugguuucauauuacugucaagcaagagagaacagugucauccuauaaugu

SEQ ID NO: 4194686 - RNA, 94 nt, Human
gcauuuuaaggcuauugucucuucauguguuuaauuuuuacauaaaauaaugauaauaaaaaaugaauaugauggaggauucucuguaaagugc

SEQ ID NO: 4194687 - RNA, 74 nt, Human
gcauuuuguaagucucucuuguuagacuggugaacaaaguggagaggugaggcaagaagagaguuuaaacaugc

SEQ ID NO: 4194688 - RNA, 58 nt, Human
gcauuuuguuuggaaaucuuuauuguuacaaagcaguggcugauuacaaacugagugu

SEQ ID NO: 4194689 - RNA, 81 nt, Human
gcauuuuucagucaucucaaacugugcuuguaaauucagaccuuuuacugaaagcauuaauuuggaugaaaacgaugaugu

SEQ ID NO: 4194690 - RNA, 60 nt, Human
gccaaaaaugucagaaaacauggagugucccagaccuucacccagauuggcauuucaggc

SEQ ID NO: 4194691 - RNA, 85 nt, Human
gccaaaaggaaggauaagacacacacauaugcugaguuagggcgcuuugcucacucaagguugugguguugcaucuucaucuggu

SEQ ID NO: 4194692 - RNA, 60 nt, Human
gccaaaagugugugaaggcaggcacauaaauaguuaagccacagucacacauuuguuggu

SEQ ID NO: 4194693 - RNA, 67 nt, Human
gccaaaauuaagagguuuggcuacaaagccccugcuuuuagccauauagugcucuuguauuuuaggu

SEQ ID NO: 4194694 - RNA, 97 nt, Human
gccaaacaaacuguggaaauugcuauuaccgaugagaaucuccuaagaaaauuaauucucuuggugauuuggguaguuucacauauacaaaacuggc

SEQ ID NO: 4194695 - RNA, 63 nt, Human
gccaaacaccuucaucuagcccugaagguauuuuuauuaggccuaugcagaaggugguuuggc

SEQ ID NO: 4194696 - RNA, 55 nt, Human
gccaaagacugagugguaagugucuuacuguuagacaaaagccucagucuuaggc

SEQ ID NO: 4194697 - RNA, 62 nt, Human
gccaaagccugcuuugccuacaagcagagaaccagaguggucccuccagagcagucuuuggc

SEQ ID NO: 4194698 - RNA, 80 nt, Human
gccaaagcgugacucuuacccggcaacgugugucgccgcuugaucgcagcggugcggugauuggguaggucaguucuggc

SEQ ID NO: 4194699 - RNA, 80 nt, Human
gccaaagcucccagggaccgcagggcaguccccacagagccccgggcugcuccugagcuucccuggaccuagagccuggc

SEQ ID NO: 4194700 - RNA, 74 nt, Human
gccaaagcugggcuuccuaccuuucuucuagaucuuuggaggagcccuggguuagggugggagcaguuuuaggc

SEQ ID NO: 4194701 - RNA, 59 nt, Human
gccaaagguuggccugugaguugcacgccugcagcuggaacuggcagaccaacuauggc

SEQ ID NO: 4194702 - RNA, 69 nt, Human
gccaaaguccacuugcuuucuguaccuggaaaaucauccccaccagcucagacagaugugacugauggc

SEQ ID NO: 4194703 - RNA, 63 nt, Human
gccaaaguccuccagccaugcacacacacgcucugugcuccacugggcaaagggggcauuggc

SEQ ID NO: 4194704 - RNA, 64 nt, Human
gccaaaguugguuagggaucugcugauaucaucucagugccuacuuugaucaauuagucuuggc

SEQ ID NO: 4194705 - RNA, 79 nt, Human
gccaaaucaauucauugacugguucguuaaguacagccauauuguccaacacaacaaucacuuaaugauagaugggggc

SEQ ID NO: 4194706 - RNA, 76 nt, Human
gccaaauccauggguuccugucccgccugccucuuccagaucucagccaggccaggaggcaggggcucaauggggc

SEQ ID NO: 4194707 - RNA, 56 nt, Human
gccaaaugcaggaagagcccuggagcucggaguggagccguugggcuccugcuggc

SEQ ID NO: 4194708 - RNA, 93 nt, Human
gccaaaugcuguacaccugcgggaagguucguuauuaucugaugaaugaaucaaugaaauguagcuuauccauacaaugaaauggcauucggc

SEQ ID NO: 4194709 - RNA, 119 nt, Human
gccaaauguuccuucaggguucccuaggaguucagugugaauugcuugaugaguggacaaagugggagcuauuugaagguaaauuauauugaucaacuagcccccaucagguuuuuggc

SEQ ID NO: 4194710 - RNA, 99 nt, Human
gccaaauuuauguacuucggaauuauuaaaauagaggaugucaugcuaggauugauccauucugcaggcaaaauauucauuuuucaggguuucuuuggc

SEQ ID NO: 4194711 - RNA, 60 nt, Human
gccaaccauuggcuucuugucacagccucgaacugcugggcagguggguggugguugugc

SEQ ID NO: 4194712 - RNA, 72 nt, Human
gccaaccuagagcucacucagccucuccccauuuuuggaaaugauggaaggcuugaguucccaggucaaggc

SEQ ID NO: 4194713 - RNA, 76 nt, Human
gccaaccuccagcuuuuuagagacauuucugguuugauucacggagucuguguugucuagaagagcuugacuuggu

SEQ ID NO: 4194714 - RNA, 73 nt, Human
gccaacguuguaguucugagaaguccaggaaacacuccagccugaggcuaccagauaaauuacagaguugugc

SEQ ID NO: 4194715 - RNA, 80 nt, Human
gccaacugccacuaggccauauagaugagggaaaguguuuauuuauugcucuauuauggccuaaaccggcauuauuuggc

SEQ ID NO: 4194716 - RNA, 63 nt, Human
gccaacuguugcaaaucuuugccagaaggcugcccucaggcagcuggaauuugcucagcuggc

SEQ ID NO: 4194717 - RNA, 102 nt, Human
gccaacuugggagaaaggcaaagagacaagaauuccaacgcuggcuacuugacagcacaaugugacuggagucucuuggcugacuuguauucucucacuggu

SEQ ID NO: 4194718 - RNA, 56 nt, Human
gccaagaauagagauaggugauccccgaaaaacuuuugguaucucugcuucauggu

SEQ ID NO: 4194719 - RNA, 113 nt, Human
gccaagaaugagaugggggcugugggacccgcuucaggcgcauggugagcagaugaugcauccguuucucugucucccguguguccgggucaaggcggccucuggucucuggc

SEQ ID NO: 4194720 - RNA, 78 nt, Human
gccaagacgcucggguaugugcaguccuagaaucccccagcagagccugaggacacaugcacacccugcguccauggc

SEQ ID NO: 4194721 - RNA, 63 nt, Human
gccaagagagaaguaaagcacacugagauaaaucuaguguuucacagcacuuuuucucuaggc

SEQ ID NO: 4194722 - RNA, 95 nt, Human
gccaagcucuucugaguggcacaaaucuagucccuggugaccugcugccaaaaagcauucaaccaaaggaagcuagacccuggccaugaaguggc

SEQ ID NO: 4194723 - RNA, 64 nt, Human
gauaugaacauauccuccggauagcgugagacacguuucagugaucuaaggguauggccauguc

SEQ ID NO: 4194724 - RNA, 64 nt, Human
gauaugaaguggcauugugaagggagauuuuacucuuuucucuuuucugaaggcaacaucuauc

SEQ ID NO: 4194725 - RNA, 77 nt, Human
gauaugaaucagagaagccacuggagguugagaugucucuggaaagacauuuaaugucaacugguuugaagcauguc

SEQ ID NO: 4194726 - RNA, 76 nt, Human
gauaugauucucauuuuauaaacuuauccaacgucacauaggaauaaguggcagaauaagagugagaacucaaauc

SEQ ID NO: 4194727 - RNA, 58 nt, Human
gauaugcuguagucucuacagcugguauugugauaugcuguagucucuacagcugguc

SEQ ID NO: 4194728 - RNA, 97 nt, Human
gauauggaauaaaaucaaucuauagagcuuuagacuauaucaaaagaaauagcucuugaaaucugguugaaguuuuggguugaauucuuuccguguu

SEQ ID NO: 4194729 - RNA, 66 nt, Human
gauauggcccuaucauucauugagugcuuuuagaucucuggcaccccaagaugguggaggcuuauc

SEQ ID NO: 4194730 - RNA, 67 nt, Human
gauauguaccaccucuuaaaaguuagaucgaaauggaauugacagagaggaaggggguggacauuuc

SEQ ID NO: 4194731 - RNA, 130 nt, Human
gauauguccggaauuaugcagcuauuaaaaguguaauacuuuugaacugaaaggcauggcuggaaaaugcaaugcuuuuguuuaaaggcuauauacaaacuuaaugucuucccccaaagucuggaaauac

SEQ ID NO: 4194732 - RNA, 120 nt, Human
gauaugugugugugugugugugugugugcgcgcgcacaucuguguauguguguauucacacuggugugcauacacacauagguaugggcauauauacacaggcacacacacacacauauc

SEQ ID NO: 4194733 - RNA, 110 nt, Human
gauauguuauaguuugucaguggcagaacuaccuuuuuaugaggcaacugucuaaccuacuaagcuucaugaggguuuuuuucugccuuacuuagagauuuagacauuuc

SEQ ID NO: 4194734 - RNA, 75 nt, Human
gauauuaacauuucuggaacugugaauaguuuguacccucugaauaguacauacaguaccagaaaugcuaagauc

SEQ ID NO: 4194735 - RNA, 75 nt, Human
gauauuauaguagaugcuuccuuuguaugcugauuuaauugucaaaacauacuacaagguaugugcuaaaauauc

SEQ ID NO: 4194736 - RNA, 72 nt, Human
gauauucuauuuuagccagcuaauacucaacuacgauuugcaauuuagagaguugugcuuguauagauuguc

SEQ ID NO: 4194737 - RNA, 82 nt, Human
gauauugccacugaagguaggaccaaggcucaccucauugacuaauggguaugguuaaucuuucagccuacaugguaauauc

SEQ ID NO: 4194738 - RNA, 77 nt, Human
gauauuggcuugguuuacaauugguuuucucuaauuuaauagguuaggaagguauaguuguauucugagcuaacauc

SEQ ID NO: 4194739 - RNA, 104 nt, Human
gauauugggaaauugaggcgggaagauagaccgauugaggaaguauagaauuaggggauuaugcugccuuagaaauggcuauaaacuguaauauuuucuauauc

SEQ ID NO: 4194740 - RNA, 88 nt, Human
gauauuguucuguuuuuggaaggagauccacacuuauuuucagcgcuggcagcaguggggucuccuccagcccccggaagcauguguc

SEQ ID NO: 4194741 - RNA, 83 nt, Human
gauauuguugauuucuuuagguguaauaguggcauuuacaacguugagagaaacauacugaaauacuaagaaguuaacugauc

SEQ ID NO: 4194742 - RNA, 68 nt, Human
gauauuuacugucuggcccuugacugaaaaaguuugcugaccucagaaagaacacaggcaguaguguc

SEQ ID NO: 4194743 - RNA, 83 nt, Human
gauauuucaaaguaaagcuauacaucuuuucuuggcccagagaggagcuacaaagaaaguauacuggacguuggaaauguauc

SEQ ID NO: 4194744 - RNA, 67 nt, Human
gauauuucagaugaccaaauggaaaaaagcacuaaagcaauuuucuagcaaauguaucugaaauauu

SEQ ID NO: 4194745 - RNA, 80 nt, Human
gauauuugaggagagguuauccguguuauguucgcuucauucaucaugaauaauacaugguuaaccucuuuuugaauauc

SEQ ID NO: 4194746 - RNA, 78 nt, Human
gaucaaugccagugcucaacuucggcuuguuaccaccaccggggguggaagggagaagguugggugacggcaaugguc

SEQ ID NO: 4194747 - RNA, 61 nt, Human
gaucacacugcucauuagaauuaaguauaaugaaguauuuucaauuuugaggcagugguuc

SEQ ID NO: 4194748 - RNA, 55 nt, Human
gaucacauagacauuagcuccauuuguaauucuuggacuguguggaagugugauu

SEQ ID NO: 4194749 - RNA, 60 nt, Human
gaucacaugaauggaauagaagguugaauaauaacauuucauuucccagucgugcugauc

SEQ ID NO: 4194750 - RNA, 58 nt, Human
gaucaccgagguuccuuucagggcuuaauuucacugcuuugagauuucuuaggugauu

SEQ ID NO: 4194751 - RNA, 60 nt, Human
gaucaccuugggcugacacaacgaucuacuccaccagcuuguucuaucagcucagguguc

SEQ ID NO: 4194752 - RNA, 66 nt, Human
gaucagaaauucagcugacuccacaugguuuuaaggaaaugcaauguaguuaaugagcuuuugauc

SEQ ID NO: 4194753 - RNA, 68 nt, Human
gaucagcaugacagugccauugacgcugaccuucaucucuaggcugcuguugcauuucauguuugauu

SEQ ID NO: 4194754 - RNA, 63 nt, Human
gaucagcugcagaaagguacuaggaaacuuuguaaagugggggaacuguucuguauguugauu

SEQ ID NO: 4194755 - RNA, 59 nt, Human
gaucaggaauauuggaaaguacuuaaaggaugaaguacacuaccaauaguucuuugauu

SEQ ID NO: 4194756 - RNA, 64 nt, Human
gaucaggaguugauuuuggauauauuauaccugauguuuugauaugucccucgacaucaggguc

SEQ ID NO: 4194757 - RNA, 57 nt, Human
gaucaggaugacaacugcuggguucuacuuucccuguucacccaccaucaccugguu

SEQ ID NO: 4194758 - RNA, 82 nt, Human
gaucaggcaaacaaaauggauucucacauaaagaagcauuuuuucucugugguacugagagucuauuuucuucugucucuuc

SEQ ID NO: 4194759 - RNA, 55 nt, Human
gauucuuuacaucucugcugacagauuucaucacuggugcugagugcagggaguc

SEQ ID NO: 4194760 - RNA, 74 nt, Human
gauugaaauauaaucucugguucuuguaugugagauauucccacacugcugaaguuacuagagacuaugcaauc

SEQ ID NO: 4194761 - RNA, 55 nt, Human
gauugacaauuagcccuuaggugagaauguucacuuuggacaagcugggucaguu

SEQ ID NO: 4194762 - RNA, 83 nt, Human
gauugagagcaggagcugugggaagaugguggggccagacaucagggccuuccccugagcuaccccagcuccugugcucacuc

SEQ ID NO: 4194763 - RNA, 81 nt, Human
gauugaggaaauuggaugaaggguacacggggccucugcuguuuuugcaacuuccugugaauccaucauuauuucaaaauc

SEQ ID NO: 4194764 - RNA, 59 nt, Human
gauugaggcuguuaaucauaaaggcccuguagcuagaaugaugagcaauaguuuuaauc

SEQ ID NO: 4194765 - RNA, 86 nt, Human
gauugaguguccagucugcugugguaggaagauccugguagccccagucagaaggugcuuccuaacaaggcagcuguuucucuuuc

SEQ ID NO: 4194766 - RNA, 89 nt, Human
gauugcaauuucacaggcaaaugucaauggguaauuuuugaaguuuuacuuacaaguuuacucuggugacaauuuaugugauuguuauc

SEQ ID NO: 4194767 - RNA, 126 nt, Human
gauugcauaccacugcucucugaccugggugacauagcaagaucgugucucuaaaauaaaauauauauauauuuuugagauguuguuuugcucuugucucccaggcuggaguacaauggugcgauc

SEQ ID NO: 4194768 - RNA, 57 nt, Human
gauugcauuugacaaacaacauugaguuauccaagacuagauguuugcaaagcaauc

SEQ ID NO: 4194769 - RNA, 130 nt, Human
gauugccugauggaguagaggugaggcaaguaaaggaauacagcauugccucuagguuuuggccugagccaaauauagggaugaaguugcuauuuacugagauuugugggaacuggcuuggagggcggac

SEQ ID NO: 4194770 - RNA, 57 nt, Human
gauugcugugcgccccagguguuaugaaaaucacucuccugcaaauguacagcaauu

SEQ ID NO: 4194771 - RNA, 72 nt, Human
gauugcuucaaacugagcuucaaguggcagcugugagugcugcacauaaaagguagcaguuugaaagugauu

SEQ ID NO: 4194772 - RNA, 67 nt, Human
gauugcuuuauuggguuuacugccuuguuugcaaacaagacgguucguaaacuuagugagugccauu

SEQ ID NO: 4194773 - RNA, 63 nt, Human
gauuggaagcauucugaauguccaucaaaggggacugaguuggaaacauucugaauguccauc

SEQ ID NO: 4194774 - RNA, 89 nt, Human
gauuggaauguauguuggcgguaagaaacaaauggaaaguaaggaaaauuuuuucaaguuuuauauugaagcaaacaaaauggcuaauc

SEQ ID NO: 4194775 - RNA, 66 nt, Human
gauuggacagcucguucacucugcacuaaugcacagugauaggcaguugugcucaccuuaccaguc

SEQ ID NO: 4194776 - RNA, 80 nt, Human
gauuggcuaaugcucugugguuuuagggcugauguggagaaucucaacagucagaaugaagcugagcuccgacgccaguu

SEQ ID NO: 4194777 - RNA, 71 nt, Human
gauugggcucucucgugaacaggugguuggggagcccagggccuccagguuugugaguagucgcuccgguc

SEQ ID NO: 4194778 - RNA, 72 nt, Human
gauuggggugguaauacaccguucugccauauuuaaaguauaauaaagcaaaugauguguguugucccauuc

SEQ ID NO: 4194779 - RNA, 90 nt, Human
gauugguguaucauagggccccaguucuuggcugagccagggcucaccuugaguccaguuagugaggcuggguaauggaguauagcaguc

SEQ ID NO: 4194780 - RNA, 73 nt, Human
gauugguuauagcuaggcauuugccuuauuuggauaugguucaauagaaagucccuaguuaauauaacgaauu

SEQ ID NO: 4194781 - RNA, 76 nt, Human
gauugguucaguuaauccuuucaagccaagcccaugaguugugcucugcuuggaacagggguuugcccauccaauc

SEQ ID NO: 4194782 - RNA, 55 nt, Human
gauuguagaggugaaaugucuaugguaggcaacuuccaagauggccucuaagauu

SEQ ID NO: 4194783 - RNA, 74 nt, Human
gauuguauacugcacaaggccuggacacaccauucaaggaaugguguccccugggguuguguaccauuucaguc

SEQ ID NO: 4194784 - RNA, 70 nt, Human
gauugugaacuuucuugagaccagaggcuguaucuuauuuaucuuuggaucuucagaaacuagcacaguc

SEQ ID NO: 4194785 - RNA, 74 nt, Human
gauugugcuuugcaucuuguuccaguaaagucucuugucaguuugcuugucaggagccaagaaaagcagcaauu

SEQ ID NO: 4194786 - RNA, 124 nt, Human
gauuguguaggaagagaguuaaugguagcuuguuggauuuuuaaagucagaucuauuaaugucuauuucacuccgagacucuaugaaucaauaugcugcauuacacugaaucugagauaccauc

SEQ ID NO: 4194787 - RNA, 67 nt, Human
gauuguguuaucagggcagguuucucaaggacguaggguuggagccuuccagguagauggcacaguc

SEQ ID NO: 4194788 - RNA, 74 nt, Human
gauuguucaaauugauuccaaaugaguuccaucgaauggaaauuugaugacaucguaugggcaguuuugaaguc

SEQ ID NO: 4194789 - RNA, 77 nt, Human
gauuuaaaucucacaaguagaaucagccucuugaugggggauuuuuccauuauaaagcuggugcuacgaucugaauu

SEQ ID NO: 4194790 - RNA, 81 nt, Human
gauuuaaguugccuggagcaaaaaucuaaggagcagaguugcagcugguuuuucugaugauuguaauuuagguaaauaguc

SEQ ID NO: 4194791 - RNA, 65 nt, Human
gauuuaauggaggguaaaagacuuuggaauugauuuucucagugcuuaaaacccugcacuagcuc

SEQ ID NO: 4194792 - RNA, 80 nt, Human
gauuuacgugaaaguggauuaaaaggccuuucaaaagaauggguuugaaaaaccucaguccgcuuuaauacacguacauu

SEQ ID NO: 4194793 - RNA, 84 nt, Human
gauuuagucauucuuccuggggguaugaauucacaagggcaagcuuuaaaugcuguuguguacacgccuuuaaaugauugguuc

SEQ ID NO: 4194794 - RNA, 72 nt, Human
gauuuauagugcaaggucuggaugggguccccacuuguuauggguccccccagccagcuuguaguagaaguc

SEQ ID NO: 4194795 - RNA, 102 nt, Human
gauuuauguuaaaguauauuuuuucucaauauuauugguauuuucuuauugaguuuuuuuugcgcauauuauuggaguguaguauacuuuugucauguaauc

SEQ ID NO: 4194796 - RNA, 84 nt, Human
gauuucccgucuuggcccaucguaggugcucaacaauuguuucucaaaugaccagcgccugcagagggacccugacaugaacuc

SEQ ID NO: 4194797 - RNA, 77 nt, Human
gauuuccuaauguggaucucugaacucauuuuacucacaucauugugauuguguaagagguuuaaauuugggaaguc

SEQ ID NO: 4194798 - RNA, 61 nt, Human
gauuucuauuuuaaaggcauauggcuuugugcaaggggcuaugguuuuaaagguggauauc

SEQ ID NO: 4194799 - RNA, 58 nt, Human
gauuucucaaaggaauagagugaugugaaagcucacggucuauucguuggagaguuuc

SEQ ID NO: 4194800 - RNA, 76 nt, Human
gauuucugcucuaauguacaccagcaggcuggaagaacaagccucagcaagcuguggaaauuagagagacuggauc

SEQ ID NO: 4194801 - RNA, 67 nt, Human
gauuucuucugguagcaguggugggagugucaccugauaguuguaauaacaauaccaaaaggaaauc

SEQ ID NO: 4194802 - RNA, 57 nt, Human
gauuucuugagcaaguugcuuaacuuguuuugaguuucccaauuuguaaaagaaguc

SEQ ID NO: 4194803 - RNA, 74 nt, Human
gauuucuuuggguagggagcuggaauccuaaaggcaugccagacuuuccagaacacucucuuacccuagauauc

SEQ ID NO: 4194804 - RNA, 77 nt, Human
gauuugaagcaucagcagagguucaucaggcaggaaagcuuaacucuguucugaagagaaugcugcugaaccagauu

SEQ ID NO: 4194805 - RNA, 61 nt, Human
gauuugauaucuugguauacagauucgauaucucugaaucuguauaccaagaaaucauguu

SEQ ID NO: 4194806 - RNA, 80 nt, Human
gauuugcugcuacguugaauguccauuugagauuugagggcaaggauuuaaagugagaacagucagcacaguuguggguu

SEQ ID NO: 4194807 - RNA, 64 nt, Human
gauuugcuggugaauguauagcugggccuagaagcaaagccuuaaauguucaaccuggcacuuc

SEQ ID NO: 4194808 - RNA, 100 nt, Human
gauuugggguagaaaguucuguagaugucuauuaggucugcuuggugcagagcugaguucaauuccuggauauccuuguuaacuuucugucucguugauc

SEQ ID NO: 4194809 - RNA, 82 nt, Human
gauuuggucaggaugggcagccaaacuagaaauuucaugccagaaauaugaguugguuuggcugacuuagccugauuaaauu

SEQ ID NO: 4194810 - RNA, 61 nt, Human
gauuuggugagugaccuggagaggacugggguggaagucccacagaguggcucaccuaguu

SEQ ID NO: 4194811 - RNA, 82 nt, Human
gauuuguauaggcuuuugccugaagcuaaugguauauuuguuucaauaaacucagugguaacaggcuuaagccuuacuuauu

SEQ ID NO: 4194812 - RNA, 98 nt, Human
gauuuguauguguaugggcagggaggugagggaaagggacugcugugcguuccaugcaucuugauuccauuaucuuuguggcccuaaugcaagcuuuc

SEQ ID NO: 4194813 - RNA, 69 nt, Human
gccagaucuaguguuguaaagcuuuugccauacguuuucuucuaacaguuuuacaguuuuagaucuugu

SEQ ID NO: 4194814 - RNA, 56 nt, Human
gccagcaaggaggggaaaaaugcauaacugcacuuucuucagaagccuugcgaggc

SEQ ID NO: 4194815 - RNA, 86 nt, Human
gccagcaauagacuguuuuuauuguuauggcuuuguaguaugucuuaauagcuauuugggcaauuucaaaauaguuuauuuauggu

SEQ ID NO: 4194816 - RNA, 64 nt, Human
gccagcagcucuugggcgggcagagggcgaggaaagggcgccacugccagggagagcggcuggc

SEQ ID NO: 4194817 - RNA, 57 nt, Human
gccagccagagcguggaauugguagcgccuccuagucccaggauguuuauggcuggu

SEQ ID NO: 4194818 - RNA, 60 nt, Human
gccagccaucugaaggacaaggcgccgaggggugcugcagaccucaugcagguggcuggc

SEQ ID NO: 4194819 - RNA, 85 nt, Human
gccagcccccugcaaccucagcccccuccagauuuugagcaccgacaagcacugggaggaggcugagagcaacuuggcagcuggc

SEQ ID NO: 4194820 - RNA, 55 nt, Human
gccagcccgcugcagaacaccuugcucaucaugcugcuguaaugcagcggguggc

SEQ ID NO: 4194821 - RNA, 83 nt, Human
gccagcccucccuuccucccaggcuucugugcaagcccuuggaccacguaugccaguagccauuggagggcaggaggggcggc

SEQ ID NO: 4194822 - RNA, 103 nt, Human
gccagcccugaugaaaccagcugcucucagcaguuccagggccaucaucaccucucuggcugcuggagcaucugagagcauccugcaaaguuucuggguuggc

SEQ ID NO: 4194823 - RNA, 76 nt, Human
gccagccugcugagaugccucuguccuccaggauaacccuuaucacugcaaggaggcuucucaaggcucuguuagc

SEQ ID NO: 4194824 - RNA, 78 nt, Human
gccagccuggagccuguggccaugaggcuagccugccacugugggccugaagccuggugcuaugagggccagccuggc

SEQ ID NO: 4194825 - RNA, 77 nt, Human
gccagcucaguccuccucucauagagaguucuucauucccuuucccaagcugcucucuggaagggggagcugauggc

SEQ ID NO: 4194826 - RNA, 99 nt, Human
gccagcuccuucugaaugaacaugugcuaaagagaagggcagcugauaaccucuugagcaucuuaauuagcacuggauuucaucagaauggugcugugu

SEQ ID NO: 4194827 - RNA, 60 nt, Human
gccagcucucuucugaaaugugacggaccuaagcaggaagucauccaggacaggaguggc

SEQ ID NO: 4194828 - RNA, 60 nt, Human
gccagcucugcuugcccagucaggccuccuccagccugaccaugggcagcaggcuccggc

SEQ ID NO: 4194829 - RNA, 57 nt, Human
gccagcugaaauuucaguucuguuauuuuauccuuaggugaugggcuuucaguuggc

SEQ ID NO: 4194830 - RNA, 64 nt, Human
gccagcugcuuccaggaauccaucuggccucaacaacauugggcugccuggaauaacggcuggc

SEQ ID NO: 4194831 - RNA, 94 nt, Human
gccagcuggugcagcuccaggaggcucugguugacguucuucuccagguagaaggcgcaguccauggccuggagcccgcucucccagccuuggc

SEQ ID NO: 4194832 - RNA, 74 nt, Human
gccagcuguggguguaggagugaggagaggcacagggcaugcagugccuccuggcccugggccuggaagcuggc

SEQ ID NO: 4194833 - RNA, 130 nt, Human
gcaucagaaacaaaaauuggauuuuagagcuaguuaaugguuuagggcccuggcaaacacuccaugcuuuuaguugggacccucaaacaauuacacugcagaaaauaaaguucccuaaaaagucugaagc

SEQ ID NO: 4194834 - RNA, 128 nt, Human
gcaucagcaucaccugggaacuuauuagagaugcaaauuauugggucccaccccagaucuauugaauuggaaacuggggcagagcccagcaauuuggguuuaacaagccugccaggugauucuaaugc

SEQ ID NO: 4194835 - RNA, 55 nt, Human
gcaucagguagaccaagacucagaucucuacucugcuguuuucuguaccugaagc

SEQ ID NO: 4194836 - RNA, 80 nt, Human
gcaucauauuuucaagguuuauuaaauguugcaugugcagagggggcacuuuacauaaggauaaaccugggagugggugc

SEQ ID NO: 4194837 - RNA, 69 nt, Human
gcaucaugggagugacagggccacuggcaagacuuuuugccagucagccuaguucuucuuuuaagaugc

SEQ ID NO: 4194838 - RNA, 62 nt, Human
gcaucauugagaccagcuucuggguauuuauuugcaguccugauuggcugggguucugaugc

SEQ ID NO: 4194839 - RNA, 65 nt, Human
gcaucauuucucuaauccucauagccucuauuuugcagaugaggaauuugagguuagaaugaugc

SEQ ID NO: 4194840 - RNA, 71 nt, Human
gcauccagcuccaaguuugggcaucagcaauccugccuguuggcugcuaccaauguuggaugcuaggcugc

SEQ ID NO: 4194841 - RNA, 59 nt, Human
gcauccaggacuauaugaugauguucaaaaacugcauauuuuuauguccuuucuggagc

SEQ ID NO: 4194842 - RNA, 75 nt, Human
gcauccaugcaugcagggugugugcucuuuguaucuggcgucuuugggcaauucauccgcauugugugugguugc

SEQ ID NO: 4194843 - RNA, 81 nt, Human
gcaucccugagguguggcugcuuaguuuucgauacuuaccuuguuaccagaugucagacuuuaaaggcuaacagggaaugc

SEQ ID NO: 4194844 - RNA, 55 nt, Human
gcaucccuucucugucgguuuccuggguggggcuuggucacuggaguggggaugc

SEQ ID NO: 4194845 - RNA, 73 nt, Human
gcauccuauugaauguuugauugaaaauucuagaccaggguucuucaguucaggcuguucauuaggauugugc

SEQ ID NO: 4194846 - RNA, 72 nt, Human
gcauccuucucaggggagcuugccuggucaccccucuacucccagaggggugaccagagaagcucuggaugc

SEQ ID NO: 4194847 - RNA, 115 nt, Human
gcauccuuuuuauuuugaauuacauagggguagauauggcaucgucaccuuuucagugcuuggagccacugaacagccugaggagucacccuggcuucagagguggaagggaugu

SEQ ID NO: 4194848 - RNA, 107 nt, Human
gcaucucaggugagucugauguagacaguucgcccaccacauuuugagaaucacugaugccaggggguuuugggugaggagaggcugucuaacucccuuucuguugc

SEQ ID NO: 4194849 - RNA, 55 nt, Human
gcaucucuuuagaaucagauggucuccagagaucauaauggguuaugagaggugc

SEQ ID NO: 4194850 - RNA, 61 nt, Human
gcaucugaaggucuccacacuccacaucccugaagggaugcuguguggccaccuccauggc

SEQ ID NO: 4194851 - RNA, 104 nt, Human
gcaucugacugagaaggccucaguaauucauuaauuucaggguaguaaaucuuuucagcuguguaaauggacugugaauuacaagagucucucagaucagaagc

SEQ ID NO: 4194852 - RNA, 70 nt, Human
gcaucugagcuggccugugacugcacugacaaauagaauacaucagaaauguuuuaugccaguucugugu

SEQ ID NO: 4194853 - RNA, 130 nt, Human
gcaucugaugaaugcugacucugcacgacacuguuuugugugcaagagauucuggcauaaaaggacucagauccuauguucaaacuuuuuacacaccagagcagggaagcagacaacaguccauaagagc

SEQ ID NO: 4194854 - RNA, 66 nt, Human
gcaucugcaauuguuuggaaaacugagcacauuugcuuguuuguucaauccagacaauagcugugu

SEQ ID NO: 4194855 - RNA, 55 nt, Human
gcaucuggcccuugaaaaugcugagcagagaaaugcuagcaguagcgccaggugc

SEQ ID NO: 4194856 - RNA, 80 nt, Human
gcaucuguaaagauaaucauauguuuuuuguccuuuauucuguuaacuauggcauauuacauugauugguuuucagaugu

SEQ ID NO: 4194857 - RNA, 73 nt, Human
gcaucugugugccccacaaacauguaugcaacacccaccaugucuacaagccuuguucggcaccuagagaugc

SEQ ID NO: 4194858 - RNA, 59 nt, Human
gcaucuguguguauuuuaugaagccaaagacuaccacuucauaaguuugucacugaugu

SEQ ID NO: 4194859 - RNA, 68 nt, Human
gcaucuguuagagugugcaugcgggccguggggccucacagcaugugugugcacaaucuggcaugugc

SEQ ID NO: 4194860 - RNA, 81 nt, Human
gcaucuuugaauaacacuaaauguauguaacauauuucugcagccuguguugcguuuugaauagguuagcaacauagaugu

SEQ ID NO: 4194861 - RNA, 82 nt, Human
gcaucuuugcuccuugcuguuagccuacauuauugagaacuuacugaacccuuguaaaugauaguauuuggaggcaaguugc

SEQ ID NO: 4194862 - RNA, 65 nt, Human
gcaucuuugucugaacagggacauucuagacauagccucucaagaggucccugaagauaaauugc

SEQ ID NO: 4194863 - RNA, 83 nt, Human
gcaucuuugugcuaauguaguucuugcuccuaagagcugcacucacggcccaauggggaaggacagcauguaaacaaagaugc

SEQ ID NO: 4194864 - RNA, 55 nt, Human
gcaucuuuuuggguguuauuugcucagaaacuguaaauaaacuacugagagaugu

SEQ ID NO: 4194865 - RNA, 65 nt, Human
gcaugaauauuuuacaccucugcaguaaacucaauuguuaaagcaaggaauagaguaguccaugc

SEQ ID NO: 4194866 - RNA, 55 nt, Human
gcaugaauggaacccccugaguaaugugacugacucaggaagagccaguucaugc

SEQ ID NO: 4194867 - RNA, 70 nt, Human
gccauaggcugggggagcaggaccuggugugccccagagaggugcggccagcccuccaccagcucuaggc

SEQ ID NO: 4194868 - RNA, 63 nt, Human
gccauaugggauaaacccugugccuagaaaugucuggagcagguuuaggagucccuucauggu

SEQ ID NO: 4194869 - RNA, 68 nt, Human
gccauauugguuugggaggcuuugaugagaugauucugucagacagggcuucucaaacuuuaaugggc

SEQ ID NO: 4194870 - RNA, 88 nt, Human
gccaucacauaguaauugauaaauguuaauucacagccaaauaaauuugcuuaaaauuauuugucuggugaguggacaugucgugggc

SEQ ID NO: 4194871 - RNA, 74 nt, Human
gccaucagagacugccaucuccuugcauuccuauuguuccuagggucaggagacacuggcaacacucucuuggu

SEQ ID NO: 4194872 - RNA, 102 nt, Human
gccaucagugacacaggcaggaaaacaaugagccaggugguagcauaaacuuuggaaugagacugcuuuggcacaguguuuacuagcugugugaccuugggc

SEQ ID NO: 4194873 - RNA, 60 nt, Human
gccaucaugccacaguuucccaaagggggcauccacagccuucuauguggcagugauggc

SEQ ID NO: 4194874 - RNA, 72 nt, Human
gccauccucagccagaaagucuguuagggagauagucuuccccuucuuauucuucuuuuucgcugaggcagc

SEQ ID NO: 4194875 - RNA, 56 nt, Human
gccauccugugcugggccggccagcucccagcaauuacaggcccaggacgggaggc

SEQ ID NO: 4194876 - RNA, 96 nt, Human
gccaucuaagacauaucugcuggugcauguggccuugcucuguugcuuuauaccuucagcuuagagaagggaacacaucaucuggagucugauggc

SEQ ID NO: 4194877 - RNA, 59 nt, Human
gccaucuugagccaggaagugaccgaauaaaagguggcucuugggcagauuaauauggu

SEQ ID NO: 4194878 - RNA, 76 nt, Human
gccaugaaaggaagccacuucugggcgcgguauuuaaagauauguuagacagcuucuagaaauggucaccacaggc

SEQ ID NO: 4194879 - RNA, 84 nt, Human
gccaugaccaccuagugucuuuagagucacaaaaccauagccaguuaguguuggaauggaccuuggagauaauuugguucuggc

SEQ ID NO: 4194880 - RNA, 72 nt, Human
gccaugcuguuuccuacaugguguuauuugccaaccugucuggaaccauagcccacuaaggguagcgauggc

SEQ ID NO: 4194881 - RNA, 89 nt, Human
gccauggagaagcaggcucagcccaagguggagaggccauuaaggaggcuggggagccccuccauuucugggcaugauccugccaaggc

SEQ ID NO: 4194882 - RNA, 62 nt, Human
gccauggcagggaccaagcugucauuucucauaaugauuguuuauaaucuugucaaugaggc

SEQ ID NO: 4194883 - RNA, 73 nt, Human
gccauguuuuaugugugugaugggcgccgccaucuucuucgccagggcaaguauggcggccccaaaagauggc

SEQ ID NO: 4194884 - RNA, 103 nt, Human
gccauguuuuuagaaauuagaugggaacuauagggcuuuuauuacaagaaaaauauguaauacuuuuaauuccuucugaguuaaaugucaaaaaauacauggc

SEQ ID NO: 4194885 - RNA, 76 nt, Human
gccauuaaccaaauaguauacaaauaaauguguaauuaaaaaaauauaugugcauuugugugauggagugaguggc

SEQ ID NO: 4194886 - RNA, 76 nt, Human
gccauugggaugucagggcuggcccuggagggcugugcgagcccuagggcugcagccgggcuccuggcucccuggc

SEQ ID NO: 4194887 - RNA, 73 nt, Human
gccauugguuauaaagacucuuaacucccuagcgcuugguuugggcauguugggaagggaagagugagccugc

SEQ ID NO: 4194888 - RNA, 56 nt, Human
gccauugugcagagacacagcagcuccucaccccgcucugcucagcccucaguggc

SEQ ID NO: 4194889 - RNA, 72 nt, Human
gccauuuauugaagauuuugugguugcugauaguugugacauuuuaugacagcaaaccaagagacuucuggu

SEQ ID NO: 4194890 - RNA, 85 nt, Human
gccauuuauugugaggaucaaaugaaauagcaaaaagaaagcaucagucuggugccuagcauuugauucacacucacuaaauggu

SEQ ID NO: 4194891 - RNA, 66 nt, Human
gccauuucguaaugcuaugccuugcuguggaucuauuuucauuacuuaggcaggcauuuagugagu

SEQ ID NO: 4194892 - RNA, 129 nt, Human
gccauuuucucccucgcuuccccccacuucacggccgcgcggcgccccccaacccugguuccguggcgcgcgccucguucacgugacguccccagcguuccgccgcgcgcuaggcgaggggaagggggc

SEQ ID NO: 4194893 - RNA, 59 nt, Human
gcccaaaauggccaaauccaugaggacuugagagaggcacguguguggcuauuuugggu

SEQ ID NO: 4194894 - RNA, 57 nt, Human
gcccaaacuuucucuguuuugucucagcccaaaggugaguugguaggaaguuugagc

SEQ ID NO: 4194895 - RNA, 76 nt, Human
gcccaaaugaaauuugagaaguuugguuuaaacauggaaacauggaaaagcuaauuguacuucucacagauguggc

SEQ ID NO: 4194896 - RNA, 83 nt, Human
gcccaagaccacacagcuagggaguggcagagcuuggaauaacacccaagcuugucugagaucccuaaggcugugcucucagc

SEQ ID NO: 4194897 - RNA, 61 nt, Human
gcccaagagagcgaagguuggcaugcaguuccaacugccuuuccacuuugcuucucugggu

SEQ ID NO: 4194898 - RNA, 77 nt, Human
gcccaagagugcaguuucuaggucacacaaugaacacgugcuuauuaguguuguaagaagcugccacacucucaugc

SEQ ID NO: 4194899 - RNA, 63 nt, Human
gcccaagaucacacuggaaauccugaccaucggcuaguccugaacucagaugugauuuggugc

SEQ ID NO: 4194900 - RNA, 82 nt, Human
gcccaaggaagccuugccugaauacaaaauucugucugaaggaaaucuuggagauaauguguuuacaggagugucugugggu

SEQ ID NO: 4194901 - RNA, 61 nt, Human
gcccaaggcaaagcuagccuggaggaugagcagcauccgggggugguagauuuccuugagc

SEQ ID NO: 4194902 - RNA, 56 nt, Human
gcccaaguacgucaucagaagagcuuagauuggaugcccuuccuugggugcugggu

SEQ ID NO: 4194903 - RNA, 107 nt, Human
gcccaauaaugaacauuuguucuuucauaauagguuguagaaguguuuaagagucugagaguagcuucuaggggcaaugugcaaggacaagugugagaguauugggu

SEQ ID NO: 4194904 - RNA, 67 nt, Human
gcccaauacauucuucauaccuacugagguuggcaacagcuccaagguugaggagugagcccugugc

SEQ ID NO: 4194905 - RNA, 66 nt, Human
gcccaauagugucaugaaaaguacacuauaugagagaucauguggcuaacaaacaagacauuaggc

SEQ ID NO: 4194906 - RNA, 65 nt, Human
gcccaauguuuuucaaauauugcucugucuucccaguauuccuagcagagacaugaaaaacaggc

SEQ ID NO: 4194907 - RNA, 78 nt, Human
gcaagucauucugguccuacaggucacugagaggaguuuggauuuaagacugagugagcuggggagccgguggagggu

SEQ ID NO: 4194908 - RNA, 91 nt, Human
gcaaguccuggugguguuccuagagaugcaauuugauuugaucaaggacuaggucaaaccacagcucuaggcguggccuccagggguuugu

SEQ ID NO: 4194909 - RNA, 77 nt, Human
gcaagugagccagggccaugaggcacagggucacaacuaaaccaguggaccaaggccagcauggcucgggccacagc

SEQ ID NO: 4194910 - RNA, 63 nt, Human
gcaagugcacagaagcagaagcuagaccauucaucugaauuuugugauguuugugguacuugc

SEQ ID NO: 4194911 - RNA, 62 nt, Human
gcaagugguguauugugagucuucaagaaacagcaggagggagguuucacauacuuccuugc

SEQ ID NO: 4194912 - RNA, 77 nt, Human
gcaagugucuuuaaaagugcaaguugugacugauggauacccaggcaguacagaaucuauuccugcaagauacccgc

SEQ ID NO: 4194913 - RNA, 57 nt, Human
gcaaguuacuguugcuuuggcaaagacacagcuucccaggugcaagcaguaaauugc

SEQ ID NO: 4194914 - RNA, 67 nt, Human
gcaaguuauuuccauuuaaagcuaagcacaugacagcuggugacuuuuaauggaaaguaaaauuugc

SEQ ID NO: 4194915 - RNA, 76 nt, Human
gcaaguuucuagguuauggugaugcugcugguccagggaccacaguuugagaaccacuagccuaguuauuccuugu

SEQ ID NO: 4194916 - RNA, 77 nt, Human
gcaauaaauacagauaaggccagcauuucuggaguguuuaauacauugugcuuugcaggcuauaucuuauuugacgc

SEQ ID NO: 4194917 - RNA, 115 nt, Human
gcaauaagccauauucacauuguaauuguucuuuccacauucucuguuuagggauguauucuagcauguuuaaaugaggcugauguagauuaauuucucuguaggaguuuguagc

SEQ ID NO: 4194918 - RNA, 73 nt, Human
gcaauaaugccacauaaggagaaaaaaaucucauugggaccaucauucccugugucuccuuggugggauaugc

SEQ ID NO: 4194919 - RNA, 73 nt, Human
gcaauaauuccaaaauguuaccaauauuuauuacaugauuauguagaaauuaggaugauaguggaauuaaggc

SEQ ID NO: 4194920 - RNA, 68 nt, Human
gcaauaauugcuuuccagaguuagacuucaaaucacugaguagcugacuuauuaaaaguuuuuauugu

SEQ ID NO: 4194921 - RNA, 67 nt, Human
gcaauaauuuaauacagcgcugugguagucuuauuguaaaaccacagggcuuaguggaaauuuuugu

SEQ ID NO: 4194922 - RNA, 67 nt, Human
gcaauacuguaugagcuaugguaggagcacuaaggaagccuuccaaaguuauucaagcaguaagggc

SEQ ID NO: 4194923 - RNA, 66 nt, Human
gcaauacuugguuauauauaaucagggguuuuguaaugaaucuguggaaagguaaccaguaauugc

SEQ ID NO: 4194924 - RNA, 72 nt, Human
gcaauagaucauuagcgggggugagaacugggugaacucggucauuuuucuccuccuucugugauucaaugc

SEQ ID NO: 4194925 - RNA, 57 nt, Human
gcaauaggcagcaagaaauuguuugugcuacacauacaaguucucauguguaucugc

SEQ ID NO: 4194926 - RNA, 77 nt, Human
gcaugacccagggcugcccgcagauaucucugagcuuccacagcugugggcaugagagguccuggggauugucaugc

SEQ ID NO: 4194927 - RNA, 86 nt, Human
gcaugaccucaaaagggaaacaauauucaaguucagcuauauaccaaaaccagaggagaguugaacaguauuugcuucugucaugc

SEQ ID NO: 4194928 - RNA, 79 nt, Human
gcaugacugucuauguccuaaucucagcuaggagaucuugcauuucuuuuccuucuggagauggggaauaggagcaagc

SEQ ID NO: 4194929 - RNA, 87 nt, Human
gcaugagauacaggggaccuagggcugcuggaaggaugggcugcuggggcguaucucuguuccaagccuuaucccugcucuucaugc

SEQ ID NO: 4194930 - RNA, 103 nt, Human
gcaugaggaagcaggcaugguacgacaggcucagccccagcccagauagcauucacaucuuccuggauggggguugaugcccaucacucaccugcucuuuagc

SEQ ID NO: 4194931 - RNA, 78 nt, Human
gcaugagguauagaaacaucgcacagauuguaagggguggccaucccaguugugugauaagucucuugugccacaggu

SEQ ID NO: 4194932 - RNA, 74 nt, Human
gcaugagguggugcuaaucucugcucuugccccaccagugagagcggcucucuguagauagcagcgccuucugu

SEQ ID NO: 4194933 - RNA, 76 nt, Human
gcaugaucucagcaugaacuccagcagacagacaaagagucugcaguaaguuaauagugcugguaaacaucauugc

SEQ ID NO: 4194934 - RNA, 95 nt, Human
gcaugaugaggacacuauacugcucuguuuucauauguuuucaauguuccacgacaaacauguuuagaaagcagcugaagcaucuucuuuuaugc

SEQ ID NO: 4194935 - RNA, 80 nt, Human
gcaugauuugugucuuaacccagagcuggaggagaguauccuucucggguagcuguucccagcucuguguaggagucugc

SEQ ID NO: 4194936 - RNA, 100 nt, Human
gcaugcaaaugaagaggaaugaaacuauguucauuguguacccacuauguggcaagcacugugcuaaacauguaucauaagguaucucauuuuaguaugu

SEQ ID NO: 4194937 - RNA, 97 nt, Human
gcaugcagaaguuggaagaugagggaaggcaucacagaggcuguggggugaacugacuucaaggaauggguccuucccuucagagccacaugugugc

SEQ ID NO: 4194938 - RNA, 55 nt, Human
gcaugcagagucccucugcauuagaacucaagaagugcuuguuaauucugcaugc

SEQ ID NO: 4194939 - RNA, 76 nt, Human
gcaugcagggauaaugccccggagucuaauuagggcuggaaagauguugcccugagauggggauuauuccaacagc

SEQ ID NO: 4194940 - RNA, 63 nt, Human
gcaugcaguaaaauucagcaacaguccgguuagaaauguguugcuggauucauuuuuguaagu

SEQ ID NO: 4194941 - RNA, 55 nt, Human
gcaugcauuuguacuugauuuucuaaauaugugaagguugcaguccaagucaugc

SEQ ID NO: 4194942 - RNA, 58 nt, Human
gcaugcuacaggagccccacuuagaugagacaguuuagggaaagccuccugaggcggc

SEQ ID NO: 4194943 - RNA, 67 nt, Human
gcaugcugagaaacagacguguuggagcuucagggucugcuauaacauuggaugcucagcacacugc

SEQ ID NO: 4194944 - RNA, 58 nt, Human
gcaugcugagcccacgccugggcgugcgcaaucagcccuuggaguugguugaggaugc

SEQ ID NO: 4194945 - RNA, 79 nt, Human
gcaugcuuuauguguggagccagccuggagucagcauccccuguccucuugguuugccuccauggacaaaaacguaggu

SEQ ID NO: 4194946 - RNA, 63 nt, Human
gcaugcuuucacuucucugcagccaguuaguuuagcugguauggcuaacgaggucaaggcggc

SEQ ID NO: 4194947 - RNA, 66 nt, Human
gcauggagacuuagcugugugauuuccauuaccguuaaugggcauuuggcaacuaagucccugugc

SEQ ID NO: 4194948 - RNA, 56 nt, Human
gcauggcagggauuaguaguagcugggaggggacaguuacucaguuccugccaugc

SEQ ID NO: 4194949 - RNA, 63 nt, Human
gcauggccauagccuuauagcaggaccuuucauaacaguccuuuuauccccuaauuggccugc

SEQ ID NO: 4194950 - RNA, 81 nt, Human
gcauggcccagauuugcaggcaacugcugcuaggaauaaucaaaccuuauacuuauucagcacuugcucuguaagucaugc

SEQ ID NO: 4194951 - RNA, 95 nt, Human
gcauggccuguucuguuugcacaagcugagugugggagacaauagggcacugaugauuacaagacagugugguaaauauuauaauagaguugugu

SEQ ID NO: 4194952 - RNA, 70 nt, Human
gcauggcugaacacucagugacuaccacugcacuuuguuguaguuucagcauuagagaugccagcccugu

SEQ ID NO: 4194953 - RNA, 71 nt, Human
gcauggcugggugcaaguauaaccagaggaaacagucugaucuuuucucuggacuauuugcacuccuaugc

SEQ ID NO: 4194954 - RNA, 74 nt, Human
gcaugggaauuuagucuggagugaaaaagccaucaagagguaauuaucaaguucuccaauuaaaaauuguaugc

SEQ ID NO: 4194955 - RNA, 87 nt, Human
gcaugggaccugccaugugauuugaugcugucuuucagaaucacuaucaguggccccugaggagcaucagccaugguagguacaugc

SEQ ID NO: 4194956 - RNA, 56 nt, Human
gcaugggggcuagaacccagggauuugcaguccuaggucagggggugccuccaggu

SEQ ID NO: 4194957 - RNA, 70 nt, Human
gcauguaguuacacaggaaaacauuagcaagauaucuagacuucuauuuggcuccgugugacuuaauugc

SEQ ID NO: 4194958 - RNA, 57 nt, Human
gcauguauacaguagaauacuauucagcaaagaaaggaaugaagggcugauacaugc

SEQ ID NO: 4194959 - RNA, 128 nt, Human
gcauguccauacaguauagguaugucgagaaaugaaguauuauauuuuugugaguugcaauucuuuuauucacauuuuuguguacuuugguugucuuuucuuguguuuuccuaguaccaauguuaugc

SEQ ID NO: 4194960 - RNA, 87 nt, Human
gcaugugaccugccaugugauuugaagcugucuuucagaaucacuaucaguggccccugaggagcgucagccaugguagguacaugc

SEQ ID NO: 4194961 - RNA, 89 nt, Human
gcaugugccauguaguauauaugugugaacauguaugguguguucauaugugugcacauauguauuuuuguguguugugugguaugugc

SEQ ID NO: 4194962 - RNA, 70 nt, Human
gcauguggccuucaggcuggaacugcaaccucagcucuuccugggucucuagccugcuggcccagacugc

SEQ ID NO: 4194963 - RNA, 77 nt, Human
gcaugugggacaguagucacuaaacuagaucaagaagagaaagucuuugcucuuggugaacuacugaaucccauugc

SEQ ID NO: 4194964 - RNA, 57 nt, Human
gcauguggugaccccacucaugguagcagacaccaggugguucaggucaccauaggu

SEQ ID NO: 4194965 - RNA, 90 nt, Human
gcaugugucuccagaucagugagcacucuggaguugcagagggucugcaaauauuccaugcuguucaucauauaaaccuggggacaaugc

SEQ ID NO: 4194966 - RNA, 65 nt, Human
gcaugugucuccccaguggagggugggagcuuagaggucuauggcuacugugagacacaaagugc

SEQ ID NO: 4194967 - RNA, 56 nt, Human
gcaugugugucacuuuccugccugugagcuucuaaagaaggagaacauaugcaugc

SEQ ID NO: 4194968 - RNA, 55 nt, Human
gcauguguuauuucucuguggguccucaugguccaggcagggauugacacauugc

SEQ ID NO: 4194969 - RNA, 80 nt, Human
gcauguuaaauuugagaugcauaugggcuaucuaaguggaaauauuuaauaggcaguuggauaugcaagucuggauaugc

SEQ ID NO: 4194970 - RNA, 63 nt, Human
gcauguuaggaugguuuucuauucucacuggugggaauaugaacuauuccuagcccuaugugc

SEQ ID NO: 4194971 - RNA, 62 nt, Human
gcauguugacugggcuggcucugcuccacgacucacucugggccaguccaccugagacaugu

SEQ ID NO: 4194972 - RNA, 108 nt, Human
gcauguugugaacauguuuaaugguauuuguugaaaaacugugacauauaauugauauuaagacuuucagagagugacaugagaaguagaagccaugauccaacaugc

SEQ ID NO: 4194973 - RNA, 69 nt, Human
gcauguuuacugcucuagguugcacaggcaaugcuuugccaugucaaguuguggcaugucuaaagaugc

SEQ ID NO: 4194974 - RNA, 88 nt, Human
gcauuaaaggcucuugacauacuuaagcucuugacugagggcguguuggagauuaccccuuguuuuugaguacaauaguuuuguuugc

SEQ ID NO: 4194975 - RNA, 129 nt, Human
gcauuaagguaguggccggacuguguauccuuggagguguucaucugcccugaaaagaugggauucugaaccucaaaucgugcuggguagaguggaucuaagauggucaguuauggugcuccugggugc

SEQ ID NO: 4194976 - RNA, 87 nt, Human
gcauuaauaaagacaauuucgagcuguagucaaauuuggagggaauaaacuaccccuuuuccuuauacugaaagucuuuuaauaugc

SEQ ID NO: 4194977 - RNA, 55 nt, Human
gcauuaauguaagacccacuccagucccuucccuggagcuugguccaccuagugc

SEQ ID NO: 4194978 - RNA, 64 nt, Human
gcauuacaugcucuucaaggacucauaucuauuuggugugugugcuugugggcauggucugugu

SEQ ID NO: 4194979 - RNA, 65 nt, Human
gcauuagaacuaagauguccaggguguggaauguaacaggcgccuagggaccugaguucaaaugc

SEQ ID NO: 4194980 - RNA, 80 nt, Human
gcauuagcugggaacuuacuagaaaugcuagcaauaaucagaaucugcauuuuaauaagauucccaaguaauuaugaugc

SEQ ID NO: 4194981 - RNA, 65 nt, Human
gccaguaagugguagagacuuaaaucugguaggcccuuugccauucuucucuacuuacugcuggc

SEQ ID NO: 4194982 - RNA, 61 nt, Human
gccaguagcacaguggacuccaucaugcagaaggcaugaaugaagaacaucugugccaggc

SEQ ID NO: 4194983 - RNA, 76 nt, Human
gccagucacaagcguaccuaauuucggagagugacaaguacucugaaaaagaaagaagguagggcuggugacuggc

SEQ ID NO: 4194984 - RNA, 60 nt, Human
gccagucucugugccagauccugggacaacguggucaccacucugaugaauggagaaggu

SEQ ID NO: 4194985 - RNA, 61 nt, Human
gccagugaaucagcacauccagcagugagaugucacuucuguauguccugcauucaaaggc

SEQ ID NO: 4194986 - RNA, 56 nt, Human
gccaguggcuugccaggcaggacggaagcgcugcccggccauaaaugaccgcuggc

SEQ ID NO: 4194987 - RNA, 88 nt, Human
gccagugggaauuuguugaauuaagauacuuguuuuggugguguuuuuggacguaugccaaauuuguaucuuaaggacaauuacuggc

SEQ ID NO: 4194988 - RNA, 55 nt, Human
gccaguguaagcucuagacuagaaggauccuuuuagaauuagcucuuacauaagc

SEQ ID NO: 4194989 - RNA, 73 nt, Human
gccaguguggugagauuccagguggauaguaugaaaccuaucagcacauacugagaaucacacccauucuugc

SEQ ID NO: 4194990 - RNA, 58 nt, Human
gccagugugucuugcaggcuccccugccucucgcaguggagcagagcuuacagcuggc

SEQ ID NO: 4194991 - RNA, 64 nt, Human
gccaguuagucccauuugugaccuugggaacuuaguguucccagcaagaaaggggguggcuggc

SEQ ID NO: 4194992 - RNA, 121 nt, Human
gccaguuuuuucaggguugcuaaaggcagaauggguucuaguaacuaccagaauggguacugguuuucaugcugaaagaccguauuuaucugcucuuaagccucuaacugaaauggauggc

SEQ ID NO: 4194993 - RNA, 60 nt, Human
gccauacauuuugccugggcuuaaauuuaggcuaccguaagccaggagggugugaugagc

SEQ ID NO: 4194994 - RNA, 62 nt, Human
gccauagccaaagaccuuuucaaccccaagcaucugucucuugguagguacuggcuucaggc

SEQ ID NO: 4194995 - RNA, 62 nt, Human
gccauagggauagaagggguagugauggccacaggauugucucucuuagcuaugcuuauggc

SEQ ID NO: 4194996 - RNA, 61 nt, Human
gccauaggguuagugcaguacccugagcuaauaaaagcacagcuguuaccaaucuuagggc

SEQ ID NO: 4194997 - RNA, 100 nt, Human
gccaucaccagcacagcagcccgcagcagcuucagagcggcuggagagacauuuggggacgagcagccccucuguggcucugccucuguuugccaguggc

SEQ ID NO: 4194998 - RNA, 61 nt, Human
gccaucacgucagcuugccaggugguaaagcaugcccgcuucaccuggcuucugaccuggc

SEQ ID NO: 4194999 - RNA, 64 nt, Human
gccaucagaaucugauaucccaccacaguugaguaucucuggucugauaccggauuccaguugc

SEQ ID NO: 4195000 - RNA, 77 nt, Human
gccauccacauaugugucccugcuacucaacagggauccuguugauuggcauggauacagcaagcagaggugaaggc

SEQ ID NO: 4195001 - RNA, 80 nt, Human
gccauccuggccuccaggccuccuggcagccucucugccugcaggguccaggcuguguggucaugguggcuggagagggc

SEQ ID NO: 4195002 - RNA, 78 nt, Human
gccaucuacgcgucugcccaucuccgggcggggcgccggccuuggcucgcgcgcggcagggggcgggcgcgagguggc

SEQ ID NO: 4195003 - RNA, 108 nt, Human
gccaucuagauuggcaaucaggggacagcccgugucaucagcugcugacucccagggcagcucagcaacggggcugagagcccuugacucccacuucuguugauaggc

SEQ ID NO: 4195004 - RNA, 64 nt, Human
gccaucuggagagugaaauacuagucuaccauaugccuauauaacaccauguucuacagauggc

SEQ ID NO: 4195005 - RNA, 59 nt, Human
gccaucuggcauugcagcaccugauccauuugggaaggguauucagcguugucgauggc

SEQ ID NO: 4195006 - RNA, 91 nt, Human
gccaugacaccucugaaacucuccccuggucuuaccucacagugaccugcaaggaaagucacuagaaccagaggaggcagguuuggauggc

SEQ ID NO: 4195007 - RNA, 60 nt, Human
gccaugaggaacuguaagacaauuaaaccucuuuugucuauaaauuaugcagucucaggc

SEQ ID NO: 4195008 - RNA, 57 nt, Human
gccaugaggccucugaggccuaggcucagauugaaucauggccuuugaggccuaggc

SEQ ID NO: 4195009 - RNA, 61 nt, Human
gccaugcagccccugaaaauggcagcaccacuagguagcagccauggugaggguugcaggc

SEQ ID NO: 4195010 - RNA, 60 nt, Human
gcccugucccuuggcuucuaggcucucaaccuguuuagaaggcaagcuugguacaggagu

SEQ ID NO: 4195011 - RNA, 83 nt, Human
gcccugucuccaccugcaucacaggcaagcaaggcuuucugcugggaacagcuugggugugccugcgagcuguggagugaggc

SEQ ID NO: 4195012 - RNA, 110 nt, Human
gcccugucuucuaagccucuaccuuuuuucugucuuuagaaaaagagaagcucuuuaaccuucugcucucagguuucaagacaggaaaacugggggcuggucaucagugc

SEQ ID NO: 4195013 - RNA, 72 nt, Human
gcccuuaacacccacucacaucacagagcccccaugaggucuuccugugaagaucugggugcugaaauuggc

SEQ ID NO: 4195014 - RNA, 63 nt, Human
gcccuuacugagcucagcaucaucugauaguggcuucaaacaaugccaagucuuaaugagggc

SEQ ID NO: 4195015 - RNA, 65 nt, Human
gcccuuagaaauguaccaaaggaagcaucuugaaugcauuuuccuuugacauuuaugagauuugc

SEQ ID NO: 4195016 - RNA, 56 nt, Human
gcccuucaguuacuccuugaugucagaguccccauucccugggagugaaggagggu

SEQ ID NO: 4195017 - RNA, 69 nt, Human
gcccuuccuggcagaggccccgacagcacuggucccacacagcccccugccuggggcccugucaagcgc

SEQ ID NO: 4195018 - RNA, 68 nt, Human
gcccuucugcucuucuguucggugacacacaguguuccuccccugaagaggacgcagcagcaaggugc

SEQ ID NO: 4195019 - RNA, 78 nt, Human
gcccuugaaauaaugagcugugaucuaugauaaaugugccaauaacacauuuuccagggcagcauauuucagaugggu

SEQ ID NO: 4195020 - RNA, 64 nt, Human
gcccuugauuauuucuccuccccuguuagcaaaaaauuaaagggacaggaaagacgaagagggc

SEQ ID NO: 4195021 - RNA, 60 nt, Human
gcccuugcugcugcaucugagcaugugugcuugccaaagcuuggagaagcagcugguggc

SEQ ID NO: 4195022 - RNA, 83 nt, Human
gcccuuggccacguagaagugccgcgagaugaagcugacaauggcguccgugcagcgguaguucucguggaagaccaggcggc

SEQ ID NO: 4195023 - RNA, 92 nt, Human
gcccuuggcuucucucuaagguugugggacaccccugagccaauuauuagguccaggaguaucuaauaaucugagaacuagucacugagggc

SEQ ID NO: 4195024 - RNA, 71 nt, Human
gcccuuguggcaggcugaguuggccuggugagucaccuuaucuugugccaagucacuugaaucugcagggc

SEQ ID NO: 4195025 - RNA, 111 nt, Human
gcccuuucaugaccaaccacauuggggcuaggccauuucuccuggcggggcccaugugccuccccagguucaggaggugggugcuggcucucugugucuguuccugauugc

SEQ ID NO: 4195026 - RNA, 84 nt, Human
gcccuuuugguauuucaaacaaaagcaauuuaauugaggaaauuaguuacaugguuguuggaaaugcugggaaaacaaaagggu

SEQ ID NO: 4195027 - RNA, 69 nt, Human
gccgaauuggugagggauugucuaucaaauggcacuuucugggugguggagaccucgcuaacccccggc

SEQ ID NO: 4195028 - RNA, 107 nt, Human
gccgagaacgugugacucccugggccaguuucucauugaaaucagaugacgcaggaaguaucauccacauuucagugauaggcugcccccuagugacaauuuucagc

SEQ ID NO: 4195029 - RNA, 73 nt, Human
gccgagcgggagauuuaugguggcguuugcuuucauuauguguggaggcugccucgugagcucgcugcguggc

SEQ ID NO: 4195030 - RNA, 56 nt, Human
gccgaggcucugcccagcugcuguuaaaaauccuaggagcugugcagacacuucgc

SEQ ID NO: 4195031 - RNA, 87 nt, Human
gccgagggcuuggagcccuagaugaggccccagccagccggagggcuuccugggggcagcagucuugaagggcuuguaggacuuggc

SEQ ID NO: 4195032 - RNA, 123 nt, Human
gccgcacggugggaguuuaaaaguguugcuccaucuuggucuucaguaagacugugaggcucaauauuauuuuucaaaaauuuucugaggaugaggacuugguaauuacucacuuguaguggc

SEQ ID NO: 4195033 - RNA, 87 nt, Human
gccgcaucccagcugguugccauggugacccggcucuggccucuccgcagcagagaugagcaguuaccaaggaaccuggugcgcggc

SEQ ID NO: 4195034 - RNA, 99 nt, Human
gccgccaagggccgaggaaaguuuguuccaucagcagaagcccaggaaaugggaggcuccuggugcaaaguuucuucaggaagcccuggggcuguuggc

SEQ ID NO: 4195035 - RNA, 72 nt, Human
gccgcccgccucaggcucucucugccagccgugcggccaggcccgcgggguggucggggggagccgggcggc

SEQ ID NO: 4195036 - RNA, 56 nt, Human
gccgcccuucugugauccugacccuauuccaggcucaggaaacagcagggcuuggc

SEQ ID NO: 4195037 - RNA, 62 nt, Human
gccgccucuuccugaccgugugccaacgcuccaggcagccagcagggcuuagaggacaaggc

SEQ ID NO: 4195038 - RNA, 70 nt, Human
gccgccugagggagcuggagcagacgccgugggacuuuuccccugaguuauugcagcuuccuccuggagc

SEQ ID NO: 4195039 - RNA, 117 nt, Human
gccgcggcccccagcuuuuaccucuacgcgcgggccgggccgcugggcgcugccaucccaaaggcuccggagccugagcggcccagggccaggguugcgaagcggcggagucgcggu

SEQ ID NO: 4195040 - RNA, 62 nt, Human
gccggagccugcuuguugcagcugugggugaggacggcucuagcuaggugagcggcuccggc

SEQ ID NO: 4195041 - RNA, 71 nt, Human
gccggaggggcuggucuuuccacuuacucuggacaccagggaaggguucaggugggccugccccucugagc

SEQ ID NO: 4195042 - RNA, 55 nt, Human
gccggcccaccgccucccggucggaagcggcagugcaggugaggcggcggccagc

SEQ ID NO: 4195043 - RNA, 75 nt, Human
gccggcccagcucccgcaggcugcacagcuugggcagccagguccacgagccaucugcggggggacaggggcggu

SEQ ID NO: 4195044 - RNA, 76 nt, Human
gccgggaggcuggaugccuugggggaggaggaaacccacuuggauuucuccucagcaaggcagcuuuggcuccggu

SEQ ID NO: 4195045 - RNA, 76 nt, Human
gccgggccacacaggcgucgccugcucuugccaccagugccucaguggcagcagaacuggcccuguaucaggccgc

SEQ ID NO: 4195046 - RNA, 91 nt, Human
gccgggcgcagugacucacgccuguaaucccagcacuuugggaggccgaggugggcggaucacaaggucaggaguucgaggccagccuggc

SEQ ID NO: 4195047 - RNA, 58 nt, Human
gccggggaaacucaggcauuuccacuuuguuuagaaugggccaucacuuuccccaggc

SEQ ID NO: 4195048 - RNA, 107 nt, Human
gccggggaccgccaagccggagccaguggaguggggcgaagucggcgaguuggaaacuuccugcaaucguccacuccuagccuuuggcguucggcugguccucuggc

SEQ ID NO: 4195049 - RNA, 79 nt, Human
gccggggccuggcuucugaggcugaauggacuccgugaaaauggcagacacgggccuucucuucaggcgaggccugggc

SEQ ID NO: 4195050 - RNA, 95 nt, Human
gccgggucccggcuccccuuuguucccccgcugggcucggcgcuccggcgccgcccccucucgcggggcagcggagguuugggcccgggccgggc

SEQ ID NO: 4195051 - RNA, 71 nt, Human
gccguacagaccaguaguucucagcgccuuugcuuacccuggguugcucagaagacuuacugguuacuggu

SEQ ID NO: 4195052 - RNA, 57 nt, Human
gccgucgugaugaacacgccuccaccaguucccugagccauuucugucacguacggc

SEQ ID NO: 4195053 - RNA, 68 nt, Human
gccgugagaucagacacggcuugugacgcguguggacgcgugugagguugcuguuuguucgucauggc

SEQ ID NO: 4195054 - RNA, 61 nt, Human
gccgugcagcaguaacucccgugcagcaguaacucccgugcagcaguaacugcagccgugc

SEQ ID NO: 4195055 - RNA, 103 nt, Human
gccguggaguggaaggugaagcauucucuguagauggcuugagagaucaacaagggauauuugcauugcagugguuuacagggacugcuugcuccaauuuggc

SEQ ID NO: 4195056 - RNA, 68 nt, Human
gccucucagcuuuuagaaccgagccuuccgagaugcuuggagaguucuaccucugaaggcgagcgggc

SEQ ID NO: 4195057 - RNA, 64 nt, Human
gccucuccagucaacuuaaucucuuuauuuaaagaauagagugcauagagauauuugacugggc

SEQ ID NO: 4195058 - RNA, 74 nt, Human
gccucucccugcuuccuucaaguuuaucugcuggaaagagggguagacgagggaggagguagagccagagaggc

SEQ ID NO: 4195059 - RNA, 59 nt, Human
gccucuccucugaaguggugacccagaucucaguguguggcuaccucagaggagcaggu

SEQ ID NO: 4195060 - RNA, 91 nt, Human
gccucucugugacaggaugcaagcugccaccagaagagcaugaccuagugcaaggcagcucuuugagcaaggcagcucuuugcagggaggc

SEQ ID NO: 4195061 - RNA, 64 nt, Human
gccucugaaaguagguaucacuaucuccauuucaacagaugaugacacuugggcuuugagaggu

SEQ ID NO: 4195062 - RNA, 70 nt, Human
gccucugaaauauuugggcagauguuuccuguggaaaauauuccauagcgcugcccucuguuauaugggu

SEQ ID NO: 4195063 - RNA, 61 nt, Human
gccucugaaccaccaauuugcuacuuugcugccaguuugcaguugaauggucagacaaggc

SEQ ID NO: 4195064 - RNA, 85 nt, Human
gccucugacuuacaagcuagggaagcuugggcacaucaccgagucucucuaagccucaguuuccucagcuguaaaauaaggaggc

SEQ ID NO: 4195065 - RNA, 88 nt, Human
gccucugaucuugguaauguguuuguccugcagaaauaggagcucuauccugcacuaaacacacacuugguccaggagucagggaagc

SEQ ID NO: 4195066 - RNA, 82 nt, Human
gccucugcacagaugcugggaggcugagugcagcccuggaugcaggcauggcuggcuucucccuccccaucuaguuucaggc

SEQ ID NO: 4195067 - RNA, 66 nt, Human
gccucugcagagggcccuuauagggagauccaucuguaucuucuucagugccccucuaguagaggc

SEQ ID NO: 4195068 - RNA, 60 nt, Human
gccucugcccucgaggagcuuguguucucccaggagacacaggcagugaggcuagagugc

SEQ ID NO: 4195069 - RNA, 66 nt, Human
gccucugcuacaccggaauagugacauuugcccuucaguguuccuguacugcuguggcuuucaggc

SEQ ID NO: 4195070 - RNA, 99 nt, Human
gccucuggcagcugggguaauuuaaggcuucacuggagugggacaggucaccgcagguugagcuauaaaagcugccuccaguguaacuuugcucggggu

SEQ ID NO: 4195071 - RNA, 83 nt, Human
gccucugggucucugcagggcuuaccuugcucugaaaaaccauuugccagcagcguaggugacucugaacaggccggggaggc

SEQ ID NO: 4195072 - RNA, 72 nt, Human
gccucuuauggcccucagaguuugguuaaguugcagaaccuguuuaagccuguggugucaucuguaaggggc

SEQ ID NO: 4195073 - RNA, 69 nt, Human
gcauuuccuaggagauugaucacauuuaucaccauuuagauaucuaugugccaaagucuuccuaagugu

SEQ ID NO: 4195074 - RNA, 59 nt, Human
gcauuuccucuuuguaccuugacuaagccaaagcugggaaaucagcagggagggaaggu

SEQ ID NO: 4195075 - RNA, 59 nt, Human
gcauuucucaacuguauuaugcagaacuuuagaguuuugugaggugugguuaggugugu

SEQ ID NO: 4195076 - RNA, 67 nt, Human
gcauuucuggcagugaacacuuucaccauuacaggccauggugagacaaagcagcugacagaaaugc

SEQ ID NO: 4195077 - RNA, 102 nt, Human
gcauuucuuagaguaccucgaguaaacuuucgaaacacguauuucaaaacccuuauguguuuaacaucugguuuauacaauccaggaacuccuaaaaaaugu

SEQ ID NO: 4195078 - RNA, 72 nt, Human
gcauuuggugacaccgcaggcagaggggggacgccacagccagcucugcccgcggaugccacguccauuugc

SEQ ID NO: 4195079 - RNA, 106 nt, Human
gcauuuuaagugaagcuauuuauuuauacuuuauacuacaucauuaugguucaaaaccaaaaggaaucgugugguauaaaaugaaguauguuucugugaaaaaugc

SEQ ID NO: 4195080 - RNA, 100 nt, Human
gcauuuuacagcuucaugacaaacaguuuugugcccauaccuuagaaaauguggugcugaguuaaauaaaggcuguuugagcacuggagcagaaaaaugc

SEQ ID NO: 4195081 - RNA, 102 nt, Human
gcauuuuagagggucucaguuauuaucgcauucuaauuuuugagucagaagaguaauuuuccuagaaucaaagaaugggcuaguuggagauuuuuuuaaugc

SEQ ID NO: 4195082 - RNA, 72 nt, Human
gcauuuuaugggcuggccacugggucuggguagaagaaaggcccauucccaccaagcaggccaugcaaaugc

SEQ ID NO: 4195083 - RNA, 74 nt, Human
gccaaaaaggaggacugaaauaucuaaguaaccugaaagagauuaauaagaauaaaucaguuucucuuauuggu

SEQ ID NO: 4195084 - RNA, 63 nt, Human
gccaaaacaucagguuucuuuaugcugcuagaagucagauagacuuaguguagaaaccuuggu

SEQ ID NO: 4195085 - RNA, 72 nt, Human
gccaaaagagacaagggaccucuggagaggcacccgggagcgggcgucugcagggcccuuggcuccuguggc

SEQ ID NO: 4195086 - RNA, 68 nt, Human
gccaaaaucgcaucaacagaugggugacugucaauuagccauuuguuaaccaguguggauuucuuggc

SEQ ID NO: 4195087 - RNA, 81 nt, Human
gccaaacucuccugacaauuggcugucacuuauuuaacugccaccauccccaggagacagaaaaugccagaaggguggggc

SEQ ID NO: 4195088 - RNA, 72 nt, Human
gccaaagaccacaguguuuuagaaaagcuugagcagauccucugcuaaagagaaaaaaguacugugucuugc

SEQ ID NO: 4195089 - RNA, 80 nt, Human
gccaaagauagcuucagaauugagauaucuuaaggaaugaucuaugaaaguuguacucaauaucugacuaauaauuuggc

SEQ ID NO: 4195090 - RNA, 84 nt, Human
gccaaagggugguuccuagaauuacugaguacaagaaccuacuacuguaacuguggucuagggacugggaagccccaacuuggc

SEQ ID NO: 4195091 - RNA, 58 nt, Human
gccaaauacaguagucauugccauugccauuuugagcaucuacugcgcuguguugggc

SEQ ID NO: 4195092 - RNA, 82 nt, Human
gccaaaugcucuggguauuugcuaguucuccuuuuuugcucuguacucuguggauauggccuugauccuccagagcacuggu

SEQ ID NO: 4195093 - RNA, 62 nt, Human
gccaaauggcuaaguaugcccuggggcagagagaagccucuggggcagcugagucaugaggc

SEQ ID NO: 4195094 - RNA, 69 nt, Human
gccaaccccggugguggucccuuaaaaucuguccuccagauggccaaggaccacgcaucgggggagggc

SEQ ID NO: 4195095 - RNA, 68 nt, Human
gccaaccucuccuggccgggcuguccccugguaaaaugaggugggagcacuggccagcagaugagggc

SEQ ID NO: 4195096 - RNA, 79 nt, Human
gccaacuucauauuguuuccacuagauaucauuuuaaauauuccugugguuucgugguccuaagaauaugaaggcaugc

SEQ ID NO: 4195097 - RNA, 64 nt, Human
gccaacuucucuauuuaguauuccuuguuuccuguucagaccaaauccuuaaugaggaguuggu

SEQ ID NO: 4195098 - RNA, 70 nt, Human
gccaacuuucacagcuugaaaaguauugauaccacugauggaugaaauguuuuccaagcauggaaauggc

SEQ ID NO: 4195099 - RNA, 75 nt, Human
gccaagaaaagaaagaggagugcugcauguuggcagaucucagcuucaaaugcagcugcucauucucucagucuc

SEQ ID NO: 4195100 - RNA, 62 nt, Human
gccaagacuugaacccaggccugucuuccucuaaggcacaggcugaaaguuaaguucugugc

SEQ ID NO: 4195101 - RNA, 64 nt, Human
gccaagagcucagaaacccuugcugugugccccacagcagcagaagguaaaucugagccugagc

SEQ ID NO: 4195102 - RNA, 92 nt, Human
gccaagauaugauucuggacacucuugauaaagcugugaguuacuauauuuaugucacauuuguguuuuauuagagaaaguuauaucuuggu

SEQ ID NO: 4195103 - RNA, 80 nt, Human
gccaagcaaagggagguacuucuggaauaggauuauaaagugcaaaggcugcgcccuuucugauggccucccagccuggc

SEQ ID NO: 4195104 - RNA, 80 nt, Human
gccaagcaaaguaaggggcaucaguugcacauuuugccaucaagcaaagcaacaaaaugaugccuugcagcuuuuauggc

SEQ ID NO: 4195105 - RNA, 74 nt, Human
gccaagcaaguugaaugauaauacuccccugggacaaaaagguguuccgauaaguuauguaacuugcucaaggu

SEQ ID NO: 4195106 - RNA, 109 nt, Human
gccaagcacacagacccaccccuggucccaugaggaggcuguggagcacuccaucugugcucgggugaaggguuaagcugccuccccucaugggagggagggugcuggc

SEQ ID NO: 4195107 - RNA, 73 nt, Human
gccaagcacuggagggguacuuucaccuaggccaacaaacuuaauaagcagagaaacccuucaguguuuuggc

SEQ ID NO: 4195108 - RNA, 103 nt, Human
gccaagccagcauccuuugcacuuaaaguccagacuccuuugcguggauucugguccacaggacggaggucuggccgcugccaguguugcugcuuucaauggu

SEQ ID NO: 4195109 - RNA, 76 nt, Human
gccaaggagcugaagucucugcacucugccuucugucuggccacugggugucacucuucaucuauguuccuuuggu

SEQ ID NO: 4195110 - RNA, 65 nt, Human
gccaaggccaugcacauccuaggcagacccagacauugccugagcauggagguucauggccaggc

SEQ ID NO: 4195111 - RNA, 84 nt, Human
gccaagggucugccccacaggcucaguugcagagaaucaggacggcaagcagaagccucaggggcauauuugagaccuugcugc

SEQ ID NO: 4195112 - RNA, 87 nt, Human
gccaaguacagaaucagagugaaaacugagcucaaagcauauuaguugguucugagugauauauuuacucuuuguucuacacuuggc

SEQ ID NO: 4195113 - RNA, 76 nt, Human
gccaagugcggaucaugggacuucucagccuucagauacauauggggcugagacagucccaugaucugcaguuggc

SEQ ID NO: 4195114 - RNA, 61 nt, Human
gccaaucugcagggaggcucucagcagugcccuuucagaaccagcccagcagaugaaaggc

SEQ ID NO: 4195115 - RNA, 77 nt, Human
gccaauggaaugucucuuguuguugauuuuuuaccauuuagcuuucuaagucauaagucaacaaaggagaagugagc

SEQ ID NO: 4195116 - RNA, 95 nt, Human
gccaauggccacaaguuagcagguggcagaggugggaucugguaccagccagucugacuccacugccacgcucuuaaacuccaugccagagaggc

SEQ ID NO: 4195117 - RNA, 97 nt, Human
gccaauggcuuuggccacggggacccagacagucaagaggccugcugcaacccugaagaguccucccacagucuggcuccaggaccacaacauuggc

SEQ ID NO: 4195118 - RNA, 87 nt, Human
gccaauguccgucauuaucaauggaaucuuucaaucaggaaaaaucucacgagugugaggaauuggaagaccaugggugacaucugc

SEQ ID NO: 4195119 - RNA, 65 nt, Human
gccaauguguggaguggaagucaucuuuuucuuaucacacccaaugacccauuuucaguauuggc

SEQ ID NO: 4195120 - RNA, 68 nt, Human
gccaauguuuuaaaagagauugagaaucuggaauuuuauauaauuuuuuuuaacuuuuagacauuggc

SEQ ID NO: 4195121 - RNA, 64 nt, Human
gccaauguuuuuccuuccuuaauaaaguguuccaaaacaguaugcuagauggaaaaauauuggc

SEQ ID NO: 4195122 - RNA, 60 nt, Human
gccacacaaggcugggacaagugcugugguucuacagucauguuacaagcuuugcagggc

SEQ ID NO: 4195123 - RNA, 121 nt, Human
gccacacagagccugguaagcagcucugaaggcauucugucaggcccuggcagccgugacauucuagaugauuuuugagcagcugggcugacucagggcugacucacuuggcaaugugggc

SEQ ID NO: 4195124 - RNA, 63 nt, Human
gccacacugcuucuuugagccuguggcccggcaagguagucaggcucaugggauuagguuggc

SEQ ID NO: 4195125 - RNA, 65 nt, Human
gccacagacagagagucuaguguagugcuaaaggugcaugagcucuggagauccucugccugggu

SEQ ID NO: 4195126 - RNA, 75 nt, Human
gccacagauuuuugguaaauaauuugguuaccacauuacaucuugaaggacuaaauuauuucacuaauugugagc

SEQ ID NO: 4195127 - RNA, 93 nt, Human
gccacagcaccucggcaggcguggcuuuucaccugcuccucugggacagaucugcagggggcagcguagaaaaugagucccugagagcauggc

SEQ ID NO: 4195128 - RNA, 56 nt, Human
gccacagggauuguuuugugaggggaggcuguuuuauaauuaaugaucucuguugc

SEQ ID NO: 4195129 - RNA, 58 nt, Human
gccacagguggccccgagggagugggcugauuuggccugagccuccaucccccuuggc

SEQ ID NO: 4195130 - RNA, 113 nt, Human
gcccccuucucugcagcuccugagucuccacgccccguccaccccuucugcguacccaccccucccaagcacuggauggugaggcgaggacuaggcccugcagcuuguggggc

SEQ ID NO: 4195131 - RNA, 109 nt, Human
gcccccuuuccaugaguguggaugggcggggcaagccgucggggagccuggggaagcucagcccugaggggcuuacuuugcccguggaagccagugugaagguuagggc

SEQ ID NO: 4195132 - RNA, 74 nt, Human
gcccccuuugcuggugauuaaauccugaagguacacgaaguauuucagugaaugaauggcuaacagaaaagggc

SEQ ID NO: 4195133 - RNA, 66 nt, Human
gccccgacauggauuauuuugugccuaauuuuugcaucugguuuuggccaagaaaguucugugggc

SEQ ID NO: 4195134 - RNA, 85 nt, Human
gccccgaccaucccgccccgccgcgauccucugcgggccgaagcugcaggcgcagagccccauugcuggcggggcaggcgggcgc

SEQ ID NO: 4195135 - RNA, 57 nt, Human
gccccgagugucaauaguaccaagguucggaagccauggucugaaaguauuuguggc

SEQ ID NO: 4195136 - RNA, 80 nt, Human
gccccgccugagagcuuguuagaaaugcaggcgcugcuaaucagaagcugccuuuaacaagaucuccagaugaguggggc

SEQ ID NO: 4195137 - RNA, 79 nt, Human
gccccgcggcauuuaggagaagagggucagaguucaaggagugaauuugugaaucugucucuugaaaaugccccugggc

SEQ ID NO: 4195138 - RNA, 69 nt, Human
gccccuacagccccagcccgcagcccacguggcacccuacagggcugugagaguggggcugcuggaggc

SEQ ID NO: 4195139 - RNA, 73 nt, Human
gccccuaguagcuguucucuguaaauuggaguuaauaaaucccuaugagaaguggcugguauauaacgggugc

SEQ ID NO: 4195140 - RNA, 62 nt, Human
gccccuauggagcucuucuggaauuaauauucaugauucuauggaaggcauaaggaaugggc

SEQ ID NO: 4195141 - RNA, 58 nt, Human
gccccuccagaggcgacuugcaucacggagaugucggugaugauggcuugcuggaagc

SEQ ID NO: 4195142 - RNA, 71 nt, Human
gccccuccccgcuggcugcccugggucucccuuuguugauaugacuacccacagcugcacagaggaggugc

SEQ ID NO: 4195143 - RNA, 129 nt, Human
gccccucugcagcaacuucuaaaauuccuucuuuaacucuuuaguuugaaauccacauaugauaggguuuaaugcaggaggacuaaagggaugaaggacauuaaacaggaucaggauguccauggggac

SEQ ID NO: 4195144 - RNA, 105 nt, Human
gccccucugguggucccccgcugagucuuugguaaagucugcugcaucugccaauucuuuugugagcagauuuguucuaggggugugggggacuaagaaaggggu

SEQ ID NO: 4195145 - RNA, 122 nt, Human
gccccugcgcaaggccucacggcuccaggcuguuggagguaccugcccacucaaccugggcuggcuguuggagguaccugcccacucaaccuggcgggcugugcguggcuugugcuuugggc

SEQ ID NO: 4195146 - RNA, 86 nt, Human
gccccuggaguccucgguuccugcgcccuucucgcccgcggcacccucucgcgaguccacuggggggcgcaggcgggcuccagagc

SEQ ID NO: 4195147 - RNA, 61 nt, Human
gccccugggcuauguauagcuggacaguauaaaggaagcagcuggagagccaggcaggggc

SEQ ID NO: 4195148 - RNA, 75 nt, Human
gccccuguuccuaaugucuacuuuaguucacacaguggauaccacucggacuaccuggauauuggaacaaauggu

SEQ ID NO: 4195149 - RNA, 78 nt, Human
gccuuuuccaaauuacugaucuacaaaauccaugaguauaaucaaaugguuguauaaugucacuaagcuggagauggu

SEQ ID NO: 4195150 - RNA, 122 nt, Human
gccuuuugcauccuagagagcccagaggaaucagagaagguguccaucaccaacuguucuugguaacaugcagaggagaugaagauacuuuccuuaggguggugggaaacuuugaugaaggu

SEQ ID NO: 4195151 - RNA, 102 nt, Human
gccuuuugcuuagccuucaugggccaagacucagccccauggccucaaacuaacugcaaaagaggcugggaaauguagucuuccccaggaggagcaaauggu

SEQ ID NO: 4195152 - RNA, 103 nt, Human
gccuuuuucauagucaaaacauacuuuuuagaucugccuucuugggauguauucaaggaugcuagccguguuugagacuguaaauaugucuagugaauagggc

SEQ ID NO: 4195153 - RNA, 56 nt, Human
gcgaaagggguauauacauguaggccagcauacaugcauaaacuacuucuuauugc

SEQ ID NO: 4195154 - RNA, 64 nt, Human
gcgaaauggggccagggaggaccagacaacacgcaaaggcgccuuucugcucuggcccuugugc

SEQ ID NO: 4195155 - RNA, 78 nt, Human
gcgaaguguagugggcugugaucaggaugcagucuccuuccugcccaucucugugccaucauugccccugaacuaggc

SEQ ID NO: 4195156 - RNA, 55 nt, Human
gcgagaaacuaagugcccuuugcgggugacugcgcagguaccucugauuucuugc

SEQ ID NO: 4195157 - RNA, 68 nt, Human
gcgagcauagucaacacgcaaagccgacuccgccagauaaggaguugcuuuggaaacuggcccugcgc

SEQ ID NO: 4195158 - RNA, 71 nt, Human
gcgagcaugugcaugugugcacugauaauauguaccccugcaagucagagagggcacgugcacaccuacgc

SEQ ID NO: 4195159 - RNA, 105 nt, Human
gcgagugcuuaccuugauuaccuuguugaauccucaguaacucuacgagguaggugccauuuuacccaggaggaaacugaggcucagagaggcuaaguaacuugc

SEQ ID NO: 4195160 - RNA, 71 nt, Human
gcgaugggauggggaaggucggaggaaauggcugucuguguaaacccucugccugcccaccgacccauggc

SEQ ID NO: 4195161 - RNA, 86 nt, Human
gcgcagcuggcaugacucagaaacaggauucaaaaccggguaggcugguuuuagaguccaaguucuucacugacagacuguacugc

SEQ ID NO: 4195162 - RNA, 82 nt, Human
gcgcaggccuacaggugaauggcucuagaauaccccucaggcaggccacuuccuguucuagaagcuuucugaggcacuuugc

SEQ ID NO: 4195163 - RNA, 67 nt, Human
gcgcaggggcccugaucgcccccagaggugcugagcgcacagggcaguggcugcagagccccggcgc

SEQ ID NO: 4195164 - RNA, 64 nt, Human
gcgcaggucuggguugauggccugggugaucucacgcauuaggcauuggaaggucagcuugugc

SEQ ID NO: 4195165 - RNA, 58 nt, Human
gcgcaggugucuucagcaggaugaguggaggaccacucagcucuacacacaccugugu

SEQ ID NO: 4195166 - RNA, 130 nt, Human
gcgcaguuugauuugaauuucagauaaacauugaauaauuuuuucguauaaguaugucaugugcaaugcuuaggacaugcuuguacuaaaaaaauauuuauuguguaucugaaauucaaauuuagcuggc

SEQ ID NO: 4195167 - RNA, 86 nt, Human
gcgcauggguugguucgauugugaugcaagauugugagaagugaccacaggacucuugucaucaucaguuguaaauauuugugggu

SEQ ID NO: 4195168 - RNA, 66 nt, Human
gcgcaugugccacuaagaugcacagauuuccggcaacacaaugccugucuccuguuggcacauggc

SEQ ID NO: 4195169 - RNA, 55 nt, Human
gcgccaugaugucagcaacacaauuuuaugugucgauguaccugggucauggugc

SEQ ID NO: 4195170 - RNA, 58 nt, Human
gcgccaugcagcgcggugggcgggcagguuuccagcagcuccuggugcugcguggcgc

SEQ ID NO: 4195171 - RNA, 84 nt, Human
gcgcccagagccugugccugccccggggagggaaggaagugccgucuuuggccuccuccuucccgagggucucuggcugggcgu

SEQ ID NO: 4195172 - RNA, 64 nt, Human
gcgccccagggugagaaaaggcuggaugcauaaugcauucacauugagcuucacuguggggugu

SEQ ID NO: 4195173 - RNA, 84 nt, Human
gcgcccucucuaaggcacucugccaggucuccugauuuccaguuuccgggaggugaggccggcuagggugccccgagggccugc

SEQ ID NO: 4195174 - RNA, 66 nt, Human
gcgccgcccgcugcagcgccgccguccagggaccgggcccuggaggccaggaaggcagcgaggcgc

SEQ ID NO: 4195175 - RNA, 58 nt, Human
gcgccgcgaagaagccgggaagaguuugccaggcuugccucugcugcccgccggcugc

SEQ ID NO: 4195176 - RNA, 57 nt, Human
gcgccgggagccaaggaugcuguugcucccagggagaggguguccuggcugcggcgc

SEQ ID NO: 4195177 - RNA, 122 nt, Human
gcgccucgggggcugggauugggggugguggcugacggagaaggcugggcagcagagcgccuaugacauccagccccuuguccgguagccacugcuuaccuugacccccuccuccgagaugc

SEQ ID NO: 4195178 - RNA, 82 nt, Human
gcgccucugcugagaccaugaccucccauucaucacagcuugccggccaggguuaugaggaggucaggccuuacaagagugc

SEQ ID NO: 4195179 - RNA, 55 nt, Human
gcgccuggcacacagcaagggcgggaaaggcuccucccucugcuaaccgcggcgc

SEQ ID NO: 4195180 - RNA, 99 nt, Human
gcgccuggcggauccaggcucuccucgggucgcaggcgggggcugggggccgcgggcuccaggccauggcugcggaggugggccucgagcugcaggggc

SEQ ID NO: 4195181 - RNA, 87 nt, Human
gcgcgcagccuuccucccgagcucccugcgcucuauuccugucccgccgagacgacucccuggagccagcgagccgaggcggcgugc

SEQ ID NO: 4195182 - RNA, 129 nt, Human
gcgcgccgcggucugggccugcgcgagaggcugccgcccgcgucgggccugggccuacgcgugucuggccugggccugccggugcaacagcaguugucgccaccgguccuaggccgcgccgagcgaguc

SEQ ID NO: 4195183 - RNA, 62 nt, Human
gcgcgcgcgcccagggccucauggccuaucguugggcucgcagaucaccugggggcgugugc

SEQ ID NO: 4195184 - RNA, 56 nt, Human
gcgcgcucucuccagccuccccgcccgggcagggggaacaccgggcagaggcgcgc

SEQ ID NO: 4195185 - RNA, 67 nt, Human
gcgcggagguagcuggaugcggcccucucuccccgcaggagacgcggcuguucggcggcccucgcgc

SEQ ID NO: 4195186 - RNA, 76 nt, Human
gcgcggcaaguaggcaaggcucggcaaugugcggcuccuuccacgagggggcggccgagcacuggccucgccucgc

SEQ ID NO: 4195187 - RNA, 65 nt, Human
gcgcgggcaggccuuccgaguggaaccucuaugccgacaucgacgccgccuggcaggcccugcgc

SEQ ID NO: 4195188 - RNA, 86 nt, Human
gcgcgggccagcuggggccgggucugcguucccaggagcugccaccguuccagggagcaagucaggccgggacguagcgccugcgc

SEQ ID NO: 4195189 - RNA, 57 nt, Human
gcgcguaucgccgcucuggauuuaaggacaauacuuuccccuggcagccaugcgcgc

SEQ ID NO: 4195190 - RNA, 101 nt, Human
gcgcuauccugggacagagcugugggccccagcccuguauggaauggagaucccagauccugagggcucggggcucauggugccuauccugggcauggagc

SEQ ID NO: 4195191 - RNA, 62 nt, Human
gcgcucgggguuauguuugugcaggaacaccagcuccugcugcuaccuggcccacgugcugc

SEQ ID NO: 4195192 - RNA, 111 nt, Human
gcgcucugcagugacauggaguauuuuugagcugugaacauagcggcaucuguuggacacuguaugaauuauuagcucaagggaguucacaguuuuauuauugcauggugc

SEQ ID NO: 4195193 - RNA, 72 nt, Human
gcgcugacauuuuuacauuuuauucguuuauuucuuggcucaggaaugagaauguaagugaagagagggcgc

SEQ ID NO: 4195194 - RNA, 91 nt, Human
gcgcuggcuuuugcgucaucuccucccgcgccgagcucgcuccauccuggcgcaguggcgccggcucggcccgggaggagggagaaggcgc

SEQ ID NO: 4195195 - RNA, 55 nt, Human
gcgcuucugaauggcuaauggucucuaagcguaggcccuaggcuaccuggagcgc

SEQ ID NO: 4195196 - RNA, 89 nt, Human
gcgcuugucucugaggcaucugcagagcuuggugaucugcccaggaaugagcucauacauucugcagauuccagggaacagacaagagc

SEQ ID NO: 4195197 - RNA, 77 nt, Human
gcggaacuuuaaguguggaauuuuggagccagaucacccaccagguggcuaacaguuaagauuucaucauugguagc

SEQ ID NO: 4195198 - RNA, 62 nt, Human
gcggaagagcuagagcugacccgugaguuaugccucaugcugaggcagcucuugucuucugc

SEQ ID NO: 4195199 - RNA, 80 nt, Human
gcggaagggccggccaggagguggcaggacuugccuuacuacugagucgccggcauccccgccucuuccggccucuccgc

SEQ ID NO: 4195200 - RNA, 103 nt, Human
gcggacaagagguggggggacaagagguggaaucagugaguggaauuuguguuucaucaauucuacauugguucacauuuuagcgucccugaagucgaaaugc

SEQ ID NO: 4195201 - RNA, 90 nt, Human
gcccugggaguugccgucuguccuggcuggaccuuccggaaacccugcggucugaacacuggcugguccucggggacagcagcccugggc

SEQ ID NO: 4195202 - RNA, 58 nt, Human
gcccugggccccgaacugcugaggcuccaugagguccagcugugccuggcccaggagc

SEQ ID NO: 4195203 - RNA, 59 nt, Human
gcccuggggcgggcggaaggccgggugguggggccggccugagagcccuagccaggcgc

SEQ ID NO: 4195204 - RNA, 56 nt, Human
gcccugguaauaguggaauuuucuccagcaguggggagacagcccagugccagggc

SEQ ID NO: 4195205 - RNA, 76 nt, Human
gcccugucaggcagucacaggggagacugggcugcuacacaaugugcccaucucauuacuguguugcugacagcgc

SEQ ID NO: 4195206 - RNA, 64 nt, Human
gcccugucaucaaguucugucacauuugucuggguggagagcccaggggcaggaagaacagggc

SEQ ID NO: 4195207 - RNA, 92 nt, Human
gcccugugagucagcccagagccccggccauguuaggguccccuggcacagucugccuuggcuaaggggcccuuggguugagucaucagggc

SEQ ID NO: 4195208 - RNA, 79 nt, Human
gccgcuguuucuuccucuccucacaugagucacaugagccugagagccauguugaaggagaagaucuggagcuagaggc

SEQ ID NO: 4195209 - RNA, 101 nt, Human
gccgcuuucuggaguagucagucuuacauauuugaacaauaccacccugguguaauuuuaaaaaguaagagcuugauucuuuaaaaaacacuuagccaggc

SEQ ID NO: 4195210 - RNA, 88 nt, Human
gccggaggcugagccagaucugucuaugagugccaaauugcugucucagcgcugcugcugaugcauagucugcucgccugccccaggc

SEQ ID NO: 4195211 - RNA, 67 nt, Human
gccggcagcagccauccuuagagaaagagguaaacucuccccucugcagggggcuugacucuacggc

SEQ ID NO: 4195212 - RNA, 74 nt, Human
gccggcccaugguggcuuggaccagucacagugguccgggggcccagaugaggucugagcagaguggggugggc

SEQ ID NO: 4195213 - RNA, 91 nt, Human
gccggcccuuccuucaaguuuaauugagauguuuagaguugucggugcuuuugaacaugaucucaguaaacuuugcucauugauggcuggc

SEQ ID NO: 4195214 - RNA, 80 nt, Human
gccggccguaccuccgagagcaugacguacuguccccuucugcccaacgugaugcucaggaggucauagauggcugcggc

SEQ ID NO: 4195215 - RNA, 91 nt, Human
gccgggauggucuugaucuccucaccuugugaucucccugccuuggccucccaaagugcugggauuacaggcgugagccaccgugcccggc

SEQ ID NO: 4195216 - RNA, 76 nt, Human
gccgggcgggcccuggggggagcugcguccagcagagcugcugggugguugcuccucccgggcucucaucuccggu

SEQ ID NO: 4195217 - RNA, 55 nt, Human
gccggggauugagguaugacucagaaucccugauguccccuucuugaugccuggc

SEQ ID NO: 4195218 - RNA, 58 nt, Human
gccggguacauaucaaggcuuuauuaacauuuaauuaagcauuuauuaugugccaggc

SEQ ID NO: 4195219 - RNA, 56 nt, Human
gccgguauuccauauccugggagaugccucugauccuuggaugugcauggccgugc

SEQ ID NO: 4195220 - RNA, 65 nt, Human
gccggucccuccugcgagacaccggugugccagcugucaugucaccuugcagggcuggggcuggc

SEQ ID NO: 4195221 - RNA, 63 nt, Human
gccggugagccucacugcccgcugcugccgccuccgcagagugggcaggcagggugcgcaggc

SEQ ID NO: 4195222 - RNA, 60 nt, Human
gccggugcaggugagugcaggggcucacaagggugaguccaggugcuuaccuggacaggc

SEQ ID NO: 4195223 - RNA, 64 nt, Human
gccgguggcagaguuggagguggaagacagcaugucugucucccacugccaccuugucuccugu

SEQ ID NO: 4195224 - RNA, 62 nt, Human
gccgguugcugugguaguuaauauuauuugucuugcuugcgaaagaggccucagcagcuggc

SEQ ID NO: 4195225 - RNA, 59 nt, Human
gccguggggcuuccuggggcaaguuggccaucccagcccucauggaacagcuccuaggu

SEQ ID NO: 4195226 - RNA, 78 nt, Human
gccuaaaccuuuucagcugaauggagcuuuucuucucaguggaauugaguuccgcauucaguaucaaaaggugccagu

SEQ ID NO: 4195227 - RNA, 63 nt, Human
gccuaaagcccacugggcugagggcuggaaggacgagccugacccaccagcccaggggcgggc

SEQ ID NO: 4195228 - RNA, 65 nt, Human
gccuaacacagugacuggcaccuaguaugugccuaguaaauauuugucaauucacuguucauggc

SEQ ID NO: 4195229 - RNA, 103 nt, Human
gccuaauuguuucccuucuucuguggauguuggaugcaugcccuuuaucuuuugggguuuggaugcauuuccaucucauagaagcacucucuacacuguaggu

SEQ ID NO: 4195230 - RNA, 61 nt, Human
gccuacaucacugaugccaccacuccauuccuaggggguggugccacagcugaagucaggu

SEQ ID NO: 4195231 - RNA, 68 nt, Human
gccuacucuguguaagaccagugcuggguucauggggaauccaacauggguuaugcauauuguuuggu

SEQ ID NO: 4195232 - RNA, 120 nt, Human
gccuacuucuugguuuuuacagauucuuugcuuuuaaaaaggaaguugguaaguucugcuugacuaaguuaguccuuuuuaaaaguuguguauucauguagaaagcucugaaaaguaggu

SEQ ID NO: 4195233 - RNA, 55 nt, Human
gccuacuuuuucaugaaagcagcuaacuagaucggcucuuaaauguaaaguaggc

SEQ ID NO: 4195234 - RNA, 128 nt, Human
gccuagaagaaugccuggcacacaguaaguacaaagauagggaccugagugaaugagugcaucuuuuauucuucucuagaacacauaaucaccaaguccuuucacagcugaccaccacauucaggggc

SEQ ID NO: 4195235 - RNA, 59 nt, Human
gccuagagaaaaagccucugcagcgugaugugauguggacaggcuauuuucuuacgggu

SEQ ID NO: 4195236 - RNA, 63 nt, Human
gccuagaggcuuccugcaggucagggccauggaaggcuggggccagugaggaggcuuucuggc

SEQ ID NO: 4195237 - RNA, 76 nt, Human
gccuagaucaauggugggguuccaugaauagaagagaucacagauucucuuuuucacauugucccagcacuagcgc

SEQ ID NO: 4195238 - RNA, 65 nt, Human
gccuagccccaguaguccugcaggguaggagcagcugccugcuguagggccccuggggccuuggc

SEQ ID NO: 4195239 - RNA, 76 nt, Human
gccuaggaagauagguuuuaugucuggguuagauagcgcugucuagagcuggaguagaaugugcugguuccugggc

SEQ ID NO: 4195240 - RNA, 58 nt, Human
gccuaggaguggggauggcgguggcgggaucaugcagcgcgccucgccacccugcggc

SEQ ID NO: 4195241 - RNA, 57 nt, Human
gccuaggaucaaccacaugaaaagcacuuagcauaugccagguacugauccuagagc

SEQ ID NO: 4195242 - RNA, 58 nt, Human
gccuagggguaagaguacuggccuagaagauggaagccuugucucucaccaccagagc

SEQ ID NO: 4195243 - RNA, 83 nt, Human
gccuaggguagggcacugguucuaaaauuauggccccuggaccauaucacuagagaaguuguuaaaaaugccaauucuugggc

SEQ ID NO: 4195244 - RNA, 68 nt, Human
gccuagguagggaccaccuuggggaggaagccaaaaucacacugcucacccgagagccccugccccgc

SEQ ID NO: 4195245 - RNA, 72 nt, Human
gccuaguacagugcucuguaaguuuuuguuaaaugaaauauuuuuuuaaauuccuaggguauugugcuuggc

SEQ ID NO: 4195246 - RNA, 78 nt, Human
gccuauaggaaguauucaaagacugaugaguucauaucaaaagaucuuaggagccagcuugaaggaguuuccaugggc

SEQ ID NO: 4195247 - RNA, 73 nt, Human
gccuauuuauucugagccugcuguagcaagggaguccaccacuaucacuugcguuuuggcagagacucaaggc

SEQ ID NO: 4195248 - RNA, 85 nt, Human
gccucacacugacuuccaggaacagcagagggacuuggacgccucuccaggcaggcaggccuguuccuggaaagccagguggggu

SEQ ID NO: 4195249 - RNA, 55 nt, Human
gccucacagacugacugaaagccggugaacacaugugccagcagaaugaugaggc

SEQ ID NO: 4195250 - RNA, 62 nt, Human
gccucacagugugaaggucagucacauggugugugaaaaacccuugucaccuguaaaggggc

SEQ ID NO: 4195251 - RNA, 74 nt, Human
gccucacccauauaagaaucggucgcaacagaggaggacauucucuggaaaacugaaauucuugggacagaggu

SEQ ID NO: 4195252 - RNA, 61 nt, Human
gccucaccucuggccuaauugccaaacagccauggagugggcaggccagagguuugauggc

SEQ ID NO: 4195253 - RNA, 58 nt, Human
gccucacgccugcccccaaccucccgguguagggguggggcucuggcaggccugaggu

SEQ ID NO: 4195254 - RNA, 58 nt, Human
gccucacugucacuuauaguggucaaggaagauuucagagagcaaguggcauuggggu

SEQ ID NO: 4195255 - RNA, 78 nt, Human
gccucagaaguauaggagacaaacaagacugacuauuuagggccuucucuugauuguuuucugaccuuauuucuuugc

SEQ ID NO: 4195256 - RNA, 89 nt, Human
gccucagcaccccauacaucuuugguaaaugaaccugaacuuccagcugucauuauagaguuguauuuuaggaaaagugcuguugaggc

SEQ ID NO: 4195257 - RNA, 73 nt, Human
gccucagccugaucccacggggagcucuagagcaccaaugggaucauagaguuggcccacguguaggcgaggc

SEQ ID NO: 4195258 - RNA, 104 nt, Human
gccucagcucaugcccaaacccauucuccuaggaucagggguccucuuuuagcuccagagagccucugucauggagagaagcuuguuuguucacugucuuaggc

SEQ ID NO: 4195259 - RNA, 78 nt, Human
gccucagggcuggagccacagcugggagggcucccagauccugaccauauccucccagaggcugagccaggccugggc

SEQ ID NO: 4195260 - RNA, 79 nt, Human
gccucagguccagggaauggcaugacuugcccaaggccaccuggcaggguaagagcagggccagguguccggccugggu

SEQ ID NO: 4195261 - RNA, 65 nt, Human
gccucaggugguuguuuggauucuaacaagacaaugcuuguaaaacacucagcaccuagcaaggc

SEQ ID NO: 4195262 - RNA, 83 nt, Human
gccucagucucccgaguagcugggacuacaggugcccgccaccaugcccggcuaauuuuugguauuuuuaguagagacggggu

SEQ ID NO: 4195263 - RNA, 105 nt, Human
gccucaguuuuuccugucuuggaccucucugcaggggagcucaaguguccuuaugaauacuggcuuccuccagagcaggagguccuggacaggguaagcagaggc

SEQ ID NO: 4195264 - RNA, 130 nt, Human
gccucaucaagcucuggccuguuuuccacuucccugcccugagcugagguggcugccuuaguaaccgcacagauguggugacacaggcagcucccagcacggcugaggggacaucucagaccccagagcc

SEQ ID NO: 4195265 - RNA, 64 nt, Human
gccucaucauauaguaacuugugaaccacagggaaaccuucacguuuuacugagugagauaggu

SEQ ID NO: 4195266 - RNA, 74 nt, Human
gccucauccuccaaaguagcugggaccacagacaugcaccaccaugaccccagcugauuuuugcagagaugggu

SEQ ID NO: 4195267 - RNA, 81 nt, Human
gccucaucuaagagauuccuucccugaccucucucaucucuucacaccuagguuuccacucuaggaauuucucagggaggc

SEQ ID NO: 4195268 - RNA, 62 nt, Human
gccucaugauuccagaugaauugcauaguuaaauuuaaacuugcaacuuuaaauggaaaggc

SEQ ID NO: 4195269 - RNA, 68 nt, Human
gccucauuuaaccuuaguuauguccuuacacgcucuuucgcuaaagacaaacccacuaggguuagggc

SEQ ID NO: 4195270 - RNA, 55 nt, Human
gccuccacagugcagucauuccuugaucacaaaguuucugccauacugugguggu

SEQ ID NO: 4195271 - RNA, 84 nt, Human
gccuccacauuccugcccucgccacuacaguuacagagaaauuaaaaaaccuuucauuguacaacugaggguggaauuguuggc

SEQ ID NO: 4195272 - RNA, 76 nt, Human
gccuccagcauuuuucaauagaauuacugccuuguuuaggaagaaucuaauucuuauuauuuaaagugcuguuggc

SEQ ID NO: 4195273 - RNA, 66 nt, Human
gccuccagcucagcuuccugggugugucagagaggcgugccaggagccagagcugaggaaugaggc

SEQ ID NO: 4195274 - RNA, 55 nt, Human
gccuccagcuggggcauuucagcaucaagaaacugccugcccaugugcugggggc

SEQ ID NO: 4195275 - RNA, 73 nt, Human
gccuccaggagcaccaggccugugcccuuccacgucuuaagaggaggcuucagugacuggugcccucaaaggc

SEQ ID NO: 4195276 - RNA, 56 nt, Human
gccuccaggauaagucagggccuccuccugaagccuugauucacucuguggaaugc

SEQ ID NO: 4195277 - RNA, 62 nt, Human
gccuugguuuguuuauacaaaagauccuauaggugaggaucaugaaguauaaauaggaaggc

SEQ ID NO: 4195278 - RNA, 90 nt, Human
gccuuguaugguaaugcugauucaagccaccacauacugcagcauuagaaguuuagcugugauuuggggguuggaucagaacuaugcagc

SEQ ID NO: 4195279 - RNA, 73 nt, Human
gccuugucuagaauacucguauuauuccccuggcuuauuaaguaaugguaaauaauaccaguaucuaagaggu

SEQ ID NO: 4195280 - RNA, 56 nt, Human
gccuugugaauccacaguagcuauggugacaagccugcugcaacucuuuagagggu

SEQ ID NO: 4195281 - RNA, 86 nt, Human
gccuuguugcgaagguaugcuuuauuauuauuggguugcguuucauuguauuguaaucccuacuagagcauaccguacggcauggc

SEQ ID NO: 4195282 - RNA, 57 nt, Human
gccuuguuuuucccuucuaggcucggcucccgagcucugcaggagagugggcagggc

SEQ ID NO: 4195283 - RNA, 68 nt, Human
gccuuucaaaguuuugccaugcucgugguaaguugcuagagagcaguggagcgagauguuuaaaaggc

SEQ ID NO: 4195284 - RNA, 70 nt, Human
gccuuucaucagcucaucugcuccuaggauccacucuuccucuggcuggcaccugaucugagcccgaggc

SEQ ID NO: 4195285 - RNA, 55 nt, Human
gccuuucccaaugggguggguccacagggacuaguggccucugcuggggacaggc

SEQ ID NO: 4195286 - RNA, 82 nt, Human
gccuuuccucaggagagcuccuaugccucccacacacagcugggccgccguguggucugggaagcugucucugagcagaggc

SEQ ID NO: 4195287 - RNA, 101 nt, Human
gccuuucgguucaggaccuacagccccuugcacuuccccacgccuguuacacaagcccaggcugggagcagagggcgagcuccacgacagccugcagaggc

SEQ ID NO: 4195288 - RNA, 56 nt, Human
gccuuucuagucuuagaagcaguuugauucaguauuuugcuucagaaauagaaagc

SEQ ID NO: 4195289 - RNA, 90 nt, Human
gccuuucucaaaagacccucaaauuauuucugcuggaggagugucuuccaggaaggacuaaugguuuguggaauacacuuugggaaaugc

SEQ ID NO: 4195290 - RNA, 84 nt, Human
gccuuucugcgccugcgcaaagguuucugucaaaacggacagcucuagcugccuaucaggagccagcgugaggcgggggcgggc

SEQ ID NO: 4195291 - RNA, 86 nt, Human
gccuuucuguuuauguaccugaauuaguaaagccagaaugcauucaccugcuuacuuguuuacacaggggagacauuggcagaggc

SEQ ID NO: 4195292 - RNA, 92 nt, Human
gccuuugacauuaaccuguuguuuacugcagugaguguuuguugccucagcauucguuuugaauacagguuuagcuuucucaugacagaggc

SEQ ID NO: 4195293 - RNA, 65 nt, Human
gcuccagauguuucaggggaaacauuucuuauauuuaagaaugaagccacugaagacaaucuugc

SEQ ID NO: 4195294 - RNA, 72 nt, Human
gcuccagccuuccuugugguccuucucauugguacaaaucuccagugcgugggcaggcauggaagccugagu

SEQ ID NO: 4195295 - RNA, 56 nt, Human
gcuccaggagaagcagcaggaagggggcugcccaacccugguguauuuccuggggu

SEQ ID NO: 4195296 - RNA, 83 nt, Human
gcuccaggagggaagagguggugagcccaggccuuuggcaacacuggccaggcccagaggccucuucccacaaguuuggaagc

SEQ ID NO: 4195297 - RNA, 74 nt, Human
gcuccagguagaccuggacaaccacucagccucagggaaaaccauccagaggcugcccugucugucuccugggc

SEQ ID NO: 4195298 - RNA, 64 nt, Human
gcuccagguggcuuauuuguaucuuaucuggugggugccugugaccccuccaucugcuuugagu

SEQ ID NO: 4195299 - RNA, 89 nt, Human
gcuccauaaaacuacuagguggaauucauuggacuuuuccuaaaggguaggcaccaggagaaucacguuagaaguccuauuuguguggc

SEQ ID NO: 4195300 - RNA, 122 nt, Human
gcuccauaugacaggcugguuugacaaacauauugaauaccuacucugugucagggacuguccuaggugcugagaguuuauuaugauaguaagugcacaaucaguauuguugacuauugagu

SEQ ID NO: 4195301 - RNA, 62 nt, Human
gcuccaucccuggagaagcugacccagacagggcucauuggcucuugggggacagauggagu

SEQ ID NO: 4195302 - RNA, 62 nt, Human
gcuccaucugcaaagauugcaaugucccugugaggacaaggaagcaucagagcagaaggggu

SEQ ID NO: 4195303 - RNA, 71 nt, Human
gcuccaugaauucuuuuaaauggcaguaguauuugacuaguauagcaacuccaaagagacuuuguuggagc

SEQ ID NO: 4195304 - RNA, 57 nt, Human
gcuccauguaccuggggucacauuugaccagugggcaggugcuccagggcaaggagu

SEQ ID NO: 4195305 - RNA, 87 nt, Human
gcuccaugucuuccucccucucccugggaugugugguccuuuaagaaaggggccacauugaaggguggguacagaagagaugguagu

SEQ ID NO: 4195306 - RNA, 57 nt, Human
gcuccauucaaguaguuacagugguggcaugcacaauuccuaacugcaugagugggu

SEQ ID NO: 4195307 - RNA, 57 nt, Human
gcucccacaaccuucuugcuccaaguggacaguccagcaaggcagguuucugggagc

SEQ ID NO: 4195308 - RNA, 80 nt, Human
gcucccacagccuucagggcugcccagugugagagcugcugugagucuauauggguagcuugguuucucugauugggagc

SEQ ID NO: 4195309 - RNA, 72 nt, Human
gcucccacaguaaagaaacaacuucgccucaggauaaccuggacugcaguugcuauuacgugguuaaagagu

SEQ ID NO: 4195310 - RNA, 72 nt, Human
gcucccaccaggugagaagccuggcuggccccauagccaugccaugugucgggccugcaguggacccugagc

SEQ ID NO: 4195311 - RNA, 56 nt, Human
gcucccaccgccgcuauggguaggccaugcagcauuccugagggcggggugggcgc

SEQ ID NO: 4195312 - RNA, 56 nt, Human
gcucccacgcaauucuuuucaggggccuuucucuuggggccagagcugcagggagc

SEQ ID NO: 4195313 - RNA, 80 nt, Human
gcucccagcacacgcuuggggugagaccuuggcuggcagcacagggccuggucuuuucugcugcagguugugaagggggc

SEQ ID NO: 4195314 - RNA, 66 nt, Human
gcucccaggagucuggaugaggugucauuuguuuagugccauuccaaaucagaccuucuggguggu

SEQ ID NO: 4195315 - RNA, 57 nt, Human
gcucccaguggucuugaaacagggacacuaaacugaucccucugcuacacugggagc

SEQ ID NO: 4195316 - RNA, 79 nt, Human
gcucccaugugugcgcacccucccggcaucccucccuucggcaggaaugggguucagggaggguugcaagcuugggggc

SEQ ID NO: 4195317 - RNA, 77 nt, Human
gcucccauuccagggccagccauccugcugggaguuugcaucucaagcagcagcaggcccuucgggaggaggggagc

SEQ ID NO: 4195318 - RNA, 56 nt, Human
gcuccccaguaaauaaaugcauuaauuuuaacuuaguacauuuuucaguggggagu

SEQ ID NO: 4195319 - RNA, 82 nt, Human
gcuccccggcacccccucccaggcuccuagaggcccagagggaaucuggggacuuggggccugagagagggaugagggcggc

SEQ ID NO: 4195320 - RNA, 56 nt, Human
gcuccccucccuggacuguggccgcacccagccugggccauccugggaagggcugc

SEQ ID NO: 4195321 - RNA, 74 nt, Human
gcuccccuuaaaacagcaccgaagucgucuaaguuuaggagcuugcgaacucugucugcuguaacaagggaagu

SEQ ID NO: 4195322 - RNA, 79 nt, Human
gcuccccuuuuucucuuaaguccuggauauuaaauugauuaaacugauuauuuuaucccaggaugagaagcaguggagu

SEQ ID NO: 4195323 - RNA, 129 nt, Human
gcucccucauguucuuggcacagcagaaguguucugcacauggucucuacggaggaaagcuggucccccuggcccaggcagcacuuccuccgugagccccugcaguuuccuggugugugcuuggggagc

SEQ ID NO: 4195324 - RNA, 70 nt, Human
gcucccugagccuccagggcagcauggcagugggcagcacgugcggcucccauggcccuggaggcagagc

SEQ ID NO: 4195325 - RNA, 69 nt, Human
gcucccugcccugugaguuggccguuuucuucccaugguggauucaggcauuggcauggcggggugagc

SEQ ID NO: 4195326 - RNA, 60 nt, Human
gcucccuggauguggccagccagccaccugccuacguggacucuggcagcacuagggggc

SEQ ID NO: 4195327 - RNA, 89 nt, Human
gcucccuggcuuugcaccugcuucccugcggcaguccuugagacagcuccucagaaagcccaggagaacagauuaaaagcucccggagc

SEQ ID NO: 4195328 - RNA, 60 nt, Human
gcucccugguauugcugccacucucccugugcucgggaaagcuggaagaagccaguaggc

SEQ ID NO: 4195329 - RNA, 76 nt, Human
gcucccugugaggccagguaccagucaaaucuguagugggucugcuagcagaguuugguaccugggggagggaagc

SEQ ID NO: 4195330 - RNA, 57 nt, Human
gcucccuucccuccuuggccacacaaaaccuucgucaaguuaggcaggguggggagu

SEQ ID NO: 4195331 - RNA, 70 nt, Human
gcucccuuucucaaggucauugaaaauauacaguaguuucagacaucacauggguuugggcaaagggggc

SEQ ID NO: 4195332 - RNA, 99 nt, Human
gcucccuuuuugugauuauauaggcgaggccaugcaugcugaggacugcgaaggacgcuggugucuucugcaucauggucucccugaagcagaguuagu

SEQ ID NO: 4195333 - RNA, 73 nt, Human
gcuccgccccaucaguuccugccccugccccucaugcagacugcccugcuggggccgggccggaggguggagc

SEQ ID NO: 4195334 - RNA, 76 nt, Human
gcuccgcggggccgagcucugcggaaaacgugccggcggcuaccccgacggacgcagcgcgggccccgcagggagc

SEQ ID NO: 4195335 - RNA, 74 nt, Human
gcuccggccuccagccaagcagagagggcccagcaggaaggggcccugagcacugcugcugggggucacagagu

SEQ ID NO: 4195336 - RNA, 82 nt, Human
gcuccgggacggcuguucccugcgugcggccgcgggacugcggacaaagcugcaguguggucgggagcgcggggccgggagc

SEQ ID NO: 4195337 - RNA, 60 nt, Human
gcuccgggccgcgccggcagcccggggacccggcgcaacuugccgggcagccugaggagu

SEQ ID NO: 4195338 - RNA, 69 nt, Human
gcuccuccuucccugggcagguuggggacagacugacagaggaccccagccuuccaugggaauuggagc

SEQ ID NO: 4195339 - RNA, 55 nt, Human
gcuccugaccgugacugccugcucaucccaugccuggcagugucaugguaggagc

SEQ ID NO: 4195340 - RNA, 62 nt, Human
gcuccugauuugauuuugguauaucgaaccagggauauuccaguuauaucaaaucaugaagu

SEQ ID NO: 4195341 - RNA, 56 nt, Human
gcuccuggauguucaagucggccaaggucaaguuggaccggacagccuccuggagu

SEQ ID NO: 4195342 - RNA, 66 nt, Human
gcuccuggguuacuauagccucauugucugucucuccuacuuacagcuccagugcacucagguagc

SEQ ID NO: 4195343 - RNA, 76 nt, Human
gcuccuggucucccaggugauccccucguccugcacuuuggaccagggccucguguucugaguggagaccgccagc

SEQ ID NO: 4195344 - RNA, 78 nt, Human
gcuccuggugaucucuggcucugcuuguacuucauacugaaugaaccacuugcaucuuagagacucaccuaaaagagc

SEQ ID NO: 4195345 - RNA, 57 nt, Human
gcuccuguccuuagccccagagucuugggaaaguucuggauagugaagggcagcagc

SEQ ID NO: 4195346 - RNA, 60 nt, Human
gcuccuuagagguucaaacuucauaauuucagagccugaaauuagauuugauccuagagc

SEQ ID NO: 4195347 - RNA, 78 nt, Human
gcuccuucaauagguucccucucuagcuuuccccaacuguugccuuccagugcagcugugaaagggaaccaagagagc

SEQ ID NO: 4195348 - RNA, 57 nt, Human
gcuccuucuggcucccuuuuggcugggccauucggcuuggugggggugagagagagu

SEQ ID NO: 4195349 - RNA, 96 nt, Human
gcuccuuggagguaugaggccugaggccugaagccugaagugaccagcagguaacugggcaccacagccugaggccaaucagccccaagcaagagc

SEQ ID NO: 4195350 - RNA, 106 nt, Human
gcuccuuuggaaagaauaucugccgcccgaggaugggcucugccuauggaggcaacagugagugucuucagagcccaucaguggcaguggaauuaaugaagaaagc

SEQ ID NO: 4195351 - RNA, 76 nt, Human
gcuccuuuuccuuggguucugauguguuuggcaccaguggaauaucuuaugauuaccucuagggaaaguuuagagu

SEQ ID NO: 4195352 - RNA, 98 nt, Human
gcucgaaaagaaauaugaaaagaugaaaauuuacugugauggcuaguuuucuguaagacauuaauuguauuuuucaaaguuuuguuucuuaguugagc

SEQ ID NO: 4195353 - RNA, 82 nt, Human
gccuuugcuauugugaguagugccgcaauaaacauacgugugcaugugucuuuauagcagcaugauuuauaauccuuugggu

SEQ ID NO: 4195354 - RNA, 57 nt, Human
gccuuugcuggcuuugaagauggugggaggaaccacacuccaaggcuugcaggaggc

SEQ ID NO: 4195355 - RNA, 56 nt, Human
gccuuuggagcaggcuucaaucuucucucccucuggagagaagccugccucaaugc

SEQ ID NO: 4195356 - RNA, 55 nt, Human
gccuuuggcucugucugaccuggguucuaauucuuacucaguacguggccaaggc

SEQ ID NO: 4195357 - RNA, 55 nt, Human
gccuuuguacucugguccaaacuuugccaaaauauggaugcgugagugcaaacgu

SEQ ID NO: 4195358 - RNA, 66 nt, Human
gccuuuguucacuggagaguggaccucugugguuggccuguccaccuacugucagagaccaaaggu

SEQ ID NO: 4195359 - RNA, 57 nt, Human
gccuuuuaaggcagagggagaucccuauggcguuagucuucccaggccuuaaagggc

SEQ ID NO: 4195360 - RNA, 58 nt, Human
gccuuuucaacuaagauucugcaauuauaaauaaaucaauuguuagucuugaaagggu

SEQ ID NO: 4195361 - RNA, 87 nt, Human
gccuuuuccacauucacuacauauauaagguuuuucuccuguaugaguuuucugauguguagugagacugaacuuuguagagaaggc

SEQ ID NO: 4195362 - RNA, 70 nt, Human
gccuuuucuaaucuuugauuguuucucuucccaguuaaggagaaagggauaauuugaagagcgacagggu

SEQ ID NO: 4195363 - RNA, 95 nt, Human
gccuuuuguuugccuggcugcuuuaucggcugcugaaaccugucugcucaguguucucaaagccuuugaaguuuggacugcagcuaacaaggggc

SEQ ID NO: 4195364 - RNA, 66 nt, Human
gccuuuuuggcaggaauauugcagaggugauacuggguucucacucacugcauccugucagguggc

SEQ ID NO: 4195365 - RNA, 73 nt, Human
gcgaaaggucaguguccuugauuccuguuguucaugagcucccagaaccacacacaagguauacgaccaccgc

SEQ ID NO: 4195366 - RNA, 59 nt, Human
gcgaagaggagagacccacagccaggcccguagguagcaguggaaucuuuuguccaugu

SEQ ID NO: 4195367 - RNA, 65 nt, Human
gcgaaggacugcggauuguuguggaagccugugcccaacaggccugugacaccgugucugugugu

SEQ ID NO: 4195368 - RNA, 67 nt, Human
gcgaagguacauauucuaccccuuuuucucugagaaagagaaugugggcacguauguucuuauuugu

SEQ ID NO: 4195369 - RNA, 79 nt, Human
gcgacacugaccaggaagucuccguuaaugaccaaggccagcuugaccugcgacagggacucccugguuagaagguugu

SEQ ID NO: 4195370 - RNA, 70 nt, Human
gcgacaugccucuccuggagaaggcaggggcuuccuggaacuugccccagccuuaucagcggagguuugc

SEQ ID NO: 4195371 - RNA, 97 nt, Human
gcgacuggacuucgcucagcuucagacccugggcugcagcugccuaaugaggugggauggggcccuggguguguaaaguggagggaggggcaguggc

SEQ ID NO: 4195372 - RNA, 78 nt, Human
gcgagcaggcgcgccagcagcggggcuguggccggaggcagacccgggaggcuucgcagcucggcagccgccgcuugc

SEQ ID NO: 4195373 - RNA, 70 nt, Human
gcgagcaggcuagcagggcccagggcagcuugcucggccacaucugcccuggagcugcugucugcugugc

SEQ ID NO: 4195374 - RNA, 63 nt, Human
gcgagcccagcccgggcugcgcuuuccuuccggggaaagagaaaaagaucccggcucggccgc

SEQ ID NO: 4195375 - RNA, 66 nt, Human
gcgagcucaggcccuggcccaccagccaugggaaggcggguccguguggccccagggccuccucgc

SEQ ID NO: 4195376 - RNA, 75 nt, Human
gcgaggaucgcggucccggcccgcgcgcacagagacgccggucccugccaccagcgccgccauccgcauccucgu

SEQ ID NO: 4195377 - RNA, 84 nt, Human
gcgaggcgggcggcugcagacugugucugaaccuggucacguaggcugagugacgagaagcaaagucuguuuuccuaaauucgc

SEQ ID NO: 4195378 - RNA, 62 nt, Human
gcgaggcucaucauaucucaucucugccccagaaggugguucaguggaauguguugaccagc

SEQ ID NO: 4195379 - RNA, 95 nt, Human
gcgaggggucugaauucguugcaagucucugcugagaagggcuggcacauuucuuuccuguguccucuguuaggggauagcgauagacuccucgu

SEQ ID NO: 4195380 - RNA, 112 nt, Human
gcgaggucaggcugccagccagggaaggggcagggagguaagaaaggagagaaaaguucucagcugccugcccugcucccuccccacucccuggcugagggcugcccucugc

SEQ ID NO: 4195381 - RNA, 63 nt, Human
gcgagguuuuugagucauggcuggaggcaacaaggcuuauggcccugacuuggaggccugagc

SEQ ID NO: 4195382 - RNA, 94 nt, Human
gcgaugaucuugucaugcacggauugguaccuggcaggcuuaguuuucucuaggauuucugccaccaacugucacuacauacuuuucaauuugc

SEQ ID NO: 4195383 - RNA, 56 nt, Human
gcgaugcuaagccaccaucugugaggagagcucacagagguccaaacaguauaagc

SEQ ID NO: 4195384 - RNA, 84 nt, Human
gcgauggcagcucaaaggccacggacggcuccggguuggacuucaccacgcacaggcacugcaccgugucucgggcugccgcgc

SEQ ID NO: 4195385 - RNA, 88 nt, Human
gcgaugggggacuaacuggauccuggauaguuucuuucaacgugaacaaguuucaggaugcucagaguagucuacucacaccuauugc

SEQ ID NO: 4195386 - RNA, 86 nt, Human
gcgcacagccggcggcucugauccuggcgcucucccccagcauccccuggggcgggcucuggauggagccugcaggcugagccggc

SEQ ID NO: 4195387 - RNA, 88 nt, Human
gcgcagacggucuguacuuggcugguuuugaguaugugcuggugcggcuccugcacacccucucaccagcacugcagcugccuggagc

SEQ ID NO: 4195388 - RNA, 82 nt, Human
gcgcagguuuguuacauagguaaaugugugccacggugguuugcugcaccugucaacccaucaccuagguauuaagcccagc

SEQ ID NO: 4195389 - RNA, 98 nt, Human
gcgcaguacuugaccccuggcaugcacucaauguguugcagauuugaaauagaauuacaaaacuguaggaauugggugcccuaguggcaacugcuggu

SEQ ID NO: 4195390 - RNA, 70 nt, Human
gcgcaugaggggggcgcccugcagugcaggccucauuccuccccugccucggcccugcccgccugugcgu

SEQ ID NO: 4195391 - RNA, 84 nt, Human
gcgcaugauggagaugcuacuuaugaugcucccuuaagaugggcaggaugcccggggaagaaaucuggguucuucauggugugu

SEQ ID NO: 4195392 - RNA, 68 nt, Human
gcgcauucucuuuccuugcgggcggggugcggggccaaaggcucccacccccuccaaggaggaagcgc

SEQ ID NO: 4195393 - RNA, 71 nt, Human
gcgccaaaguuggaauuuuaauguauguuccagagcguacagaauaguagcuuaaagucaaacugaugcgc

SEQ ID NO: 4195394 - RNA, 86 nt, Human
gcgccaacgccgcagcgccggcgcguccccauggaaacccgcgcgcggggccuccugggaagcgccggccugcgggggcugggcgc

SEQ ID NO: 4195395 - RNA, 84 nt, Human
gcgccagaacagauuuuuauucauuuggaggucgugaauaaaacaguuuuagacuuuggagcagaaagaaauugguuagggggc

SEQ ID NO: 4195396 - RNA, 80 nt, Human
gcgccagccagucccuggggggacggggcacauuggacauguugagaccccucuggccccugugguggauuggugagcgc

SEQ ID NO: 4195397 - RNA, 97 nt, Human
gcgccagcugcaccagacccugggcaggcaagugaauaccuuaggguuuguuccugucagggucacuccugccucuggguuuuggugaaacuggcgu

SEQ ID NO: 4195398 - RNA, 82 nt, Human
gcgccccacgggucaccccuccgcgcgcugccuccugacaucccggcgcucucagcccacugaggggaaacccgggcggugc

SEQ ID NO: 4195399 - RNA, 57 nt, Human
gcgccccaugcuuguaugcaggucacaauucugauggccagcagaagcaaggggagc

SEQ ID NO: 4195400 - RNA, 83 nt, Human
gcgcccccagcuaccccauggccucgcucuacgugggggaccuccaccccgacgugaccgaggcgaugcucuaagcucagcgu

SEQ ID NO: 4195401 - RNA, 98 nt, Human
gcgccgagacuccaggcuugcgugcucuccagccccacguggagccaagcuccgcccggccgccgcugaagggcucccgagcucgggugucucggugc

SEQ ID NO: 4195402 - RNA, 101 nt, Human
gcgccgggagccaaggaugcuguugcucccagggagaggguguccuggcugcggcgcagccccaccucuccugggcagcggcuuagcguggcucuucgugc

SEQ ID NO: 4195403 - RNA, 60 nt, Human
gcgccuggacuucacuuauuugacuuuucuuuugaaaaauuaaauugcuagauccagggc

SEQ ID NO: 4195404 - RNA, 91 nt, Human
gcgccuguguucagcccuggucagccugaccccaaagccuaugcucuagcugcugugcugugggacucaggcuccugugggacacagacgu

SEQ ID NO: 4195405 - RNA, 59 nt, Human
gcgccuguuuguguucuagucuggggacuuggucucguuuggaacaagcagcaguuugc

SEQ ID NO: 4195406 - RNA, 94 nt, Human
gcgccuucuauguaccagacccuggacuggggcugaggcuccaggaucugcccuggaguugucucgagucuagaggagaggacaaaucagacgc

SEQ ID NO: 4195407 - RNA, 84 nt, Human
gcgcgagccucuuuaucuccagguugugccugcguccggagaccacccaaucuuggcgauggcgcucugagauggccucugugc

SEQ ID NO: 4195408 - RNA, 78 nt, Human
gcgcgagccucuuucggcuuuccaguuugucucgguccuuuggaacguggcaaacguggaagccgagagggcucucgc

SEQ ID NO: 4195409 - RNA, 61 nt, Human
gcgcgcacccucugagcuccgcuccgugcgaagcggcggggcugagggcucagggugcggc

SEQ ID NO: 4195410 - RNA, 64 nt, Human
gcgcgcgaggcugggcccugcaggcggcggggggcuggcgccuguguccccgguguccccgcgc

SEQ ID NO: 4195411 - RNA, 63 nt, Human
gcgcgcgucccccuuccccacugcccauggccccgucgggguuggguggaagcgggaggccgc

SEQ ID NO: 4195412 - RNA, 72 nt, Human
gcgcggagcuacaggggggagcauggggcagcccccaaggcgcgcucccugcauuucccacccuuuccacgc

SEQ ID NO: 4195413 - RNA, 55 nt, Human
gcgcggggggaggcgccuccggaucugcuccccggcucccgccucccucccucgc

SEQ ID NO: 4195414 - RNA, 84 nt, Human
gcgcguuccagcccuugaggucuguccaucucaauaaggaagauaaagccuuuauggaacaguccuagagcacggaaugaucgc

SEQ ID NO: 4195415 - RNA, 62 nt, Human
gcgcuauggggagucuuuacccagaaaagaugcaaaauaucuucacagggcuucccaugugc

SEQ ID NO: 4195416 - RNA, 75 nt, Human
gcgcucccugccucccaggccccgcgcuucccgcacagggcagauggcgcaggccuuggauccugguucggaggc

SEQ ID NO: 4195417 - RNA, 77 nt, Human
gcgcucuuuuaugcagauuuguacagugaaggauugaauuucauucaugcucauuuaacaagcuaauggaaguuugc

SEQ ID NO: 4195418 - RNA, 64 nt, Human
gcgcugcccucugugacccggcccaggagagccccucggggggaagggaagagagaggcagcgu

SEQ ID NO: 4195419 - RNA, 69 nt, Human
gcgcugccucugcucuccccacaucccgcacccgagguuuccgccccggcggggagacuagcgcagcgc

SEQ ID NO: 4195420 - RNA, 64 nt, Human
gcgcugugccuggcacccaguguuucuaauaauauaaauugagacauugugacaugcagggugc

SEQ ID NO: 4195421 - RNA, 84 nt, Human
gcgcuguggcaucucuggccagaagcaccuuuggcggccuguugggccccucgcagccucuggcugagacucugccgccggcgc

SEQ ID NO: 4195422 - RNA, 83 nt, Human
gcggaacgccuuggcgcacugggcgcacgcguagggccgcucgcccgugugcacgcgccggugcugggucaggugcgugacgc

SEQ ID NO: 4195423 - RNA, 82 nt, Human
gcggaacuuggccagcuucggcaagcagacuuugcguugcaguguagucagcuugcccagaggccgcgagccaaaggacugu

SEQ ID NO: 4195424 - RNA, 63 nt, Human
gcggaagaaagaaaaucacuccucaaaacacagcagaucugggugugaggucuuuccuuuugu

SEQ ID NO: 4195425 - RNA, 74 nt, Human
gcggacauuccuuucagugcagucggaacuacuguugaucaagcagagaguggcaguuacugaagugucccugc

SEQ ID NO: 4195426 - RNA, 56 nt, Human
gcggagcuucccuuauuauugaguugaagcucaguaauaucuguugaagcuauugc

SEQ ID NO: 4195427 - RNA, 56 nt, Human
gcggagggagauaggccuugcuauaccuguggugucugccaaagcuuccuccuggc

SEQ ID NO: 4195428 - RNA, 75 nt, Human
gcucucagccaguaucugccuacagccugaucugcuacuuucugagccaggcugugguuuagauagagugggagu

SEQ ID NO: 4195429 - RNA, 60 nt, Human
gcucucagccuagacaaggccuuccuaggaggccuaggagcccugcgggaggcagagugc

SEQ ID NO: 4195430 - RNA, 55 nt, Human
gcucuccacugaccacggggcauggucaaauguccaguuggauugcugugagagu

SEQ ID NO: 4195431 - RNA, 56 nt, Human
gcucucccugaaucucgaacuagccugagaccacugcaggcagauauagagagagc

SEQ ID NO: 4195432 - RNA, 70 nt, Human
gcucuccucucccucacaggccacuguaggccuuggaggccuugcucaagcuagugacgggcuaggaugc

SEQ ID NO: 4195433 - RNA, 82 nt, Human
gcucuccugaggacuucuauuggguucugccuagugguaaccgccgaggcuucgcuuacucuguagaucucccgggagcagc

SEQ ID NO: 4195434 - RNA, 83 nt, Human
gcucuccuguaaguucuuggcaauuugaucucaguuugcagaaggcagcuggcauacuuugcuaggaagugcagcuggagagc

SEQ ID NO: 4195435 - RNA, 61 nt, Human
gcugucuccugagacugcagucaccuuggccuacacgguggccccugucucuggggacugc

SEQ ID NO: 4195436 - RNA, 95 nt, Human
gcugucucuggaggaaccauauuuagcucauuuccagugccugaaauaugucuugcaccuguugaacagcugagcuugcccuuugaggagguggc

SEQ ID NO: 4195437 - RNA, 88 nt, Human
gcugugaaggugcauaugcuacacacaugugucucugggggugggugccuaugcuucugggcaaaugugugugacugugccuuugugu

SEQ ID NO: 4195438 - RNA, 85 nt, Human
gcugugaccuuagaaaugauuucaccucuuucuacuucuguuuccccaggugugaaaaggggauaaauuuucuguucuguacagc

SEQ ID NO: 4195439 - RNA, 95 nt, Human
gcugugaggugagccaucuggaaaacacaguguagacugaaaaauaauuauaagccaguuuauuacuuuuuuccaguuaagccuaccaugacagc

SEQ ID NO: 4195440 - RNA, 61 nt, Human
gcugugaguggaguucugugcuaaaaucugcaggugaaacuucaguaauuccagcuccagu

SEQ ID NO: 4195441 - RNA, 91 nt, Human
gcugugaguguaccuggacaccucaguguguggauguuagagaccaguguuuccucauuuggcacaucugagcucagcuuggcaccacagu

SEQ ID NO: 4195442 - RNA, 77 nt, Human
gcugugaguuauaaaugucccugucagagcccgggccgagaggcccugcugcuggcagaggcgccagggcccacagc

SEQ ID NO: 4195443 - RNA, 66 nt, Human
gcugugauugucagucuucaaucucuugucaaaaagcuuucggaaugaacugagaaucuguacagu

SEQ ID NO: 4195444 - RNA, 66 nt, Human
gcugugcacagagcaggggucugugucaguccuggguucaagcccuugcucugcccccugaccagc

SEQ ID NO: 4195445 - RNA, 57 nt, Human
gcugugcacuaccuauacauccaggugaggucgugguguguaguuaggugacacagc

SEQ ID NO: 4195446 - RNA, 108 nt, Human
gcugugcccaagacuuaacuccccaggcccagcuuuaucaagucugagcugaguuuuccuuacuaauuugaaacaggcagccagggaaggaaagucaugaaauaaagc

SEQ ID NO: 4195447 - RNA, 58 nt, Human
gcugugcccucagggaccaucugcagagguaguguggccaauuaugggcauucaaagc

SEQ ID NO: 4195448 - RNA, 57 nt, Human
gcugugcucacauguuucaaggauaaggauaauuccauugagaaucugggcuacagc

SEQ ID NO: 4195449 - RNA, 55 nt, Human
gcuguggaauggcugccagcucccuuccugggagaggcugggugggguccacagc

SEQ ID NO: 4195450 - RNA, 81 nt, Human
gcuguggagcgugcugccugccagcuucugggugcuucagagauuugccaggcccaggagggggcaggaggcgcccggagc

SEQ ID NO: 4195451 - RNA, 81 nt, Human
gcuguggauuuuuucauaguaauggugcauguagcauccacugauacacaugguuucuaugaaaggauaacuucuaccagc

SEQ ID NO: 4195452 - RNA, 57 nt, Human
gcuguggcugaccaccagggggcagcugugagccccauggccaggcacgcgcauagc

SEQ ID NO: 4195453 - RNA, 82 nt, Human
gcuguggcugaucugacaggaggcagagcucaggugguaauguuggcuugcccacugcucuccuacugcaaugcagcccagu

SEQ ID NO: 4195454 - RNA, 61 nt, Human
gcuguggcugcugguacucugggaaccggcugcugguacucugagaaccgguagucuaggc

SEQ ID NO: 4195455 - RNA, 59 nt, Human
gcuguggcuguccaaggccuucacgccucugcacuccaggaggccucuggacuggcagc

SEQ ID NO: 4195456 - RNA, 63 nt, Human
gcugugggcuucaggcugaauuccuccuagauaggaaagcugucuauggccuucugucacagu

SEQ ID NO: 4195457 - RNA, 81 nt, Human
gcugugguguguauuuuaaggccuugagggaaauuuuaaaaacuuaaaacugagauuuccugcacugccuuugaucacagc

SEQ ID NO: 4195458 - RNA, 57 nt, Human
gcuguguacauugucacucaucaaguuuacgaaagagcuaggggacaugugcaaggc

SEQ ID NO: 4195459 - RNA, 56 nt, Human
gcuguguaccuacuaacugcuuuacccuggucuucuggcaggauagguauaucagc

SEQ ID NO: 4195460 - RNA, 106 nt, Human
gcuguguaggugguuuuagagauucugauggcuuacagacaguuaggaugccaagauccaaacucaaguuacaggccagauagguucugcaagacuucugcacagu

SEQ ID NO: 4195461 - RNA, 56 nt, Human
gcuguguaugaugcaggcaccugggccgucacucagcuggcugucucuuacacggu

SEQ ID NO: 4195462 - RNA, 79 nt, Human
gcuguguccgucucuuuugaacucacuggaugaguuaacacucagccaguuaaggcuuagacaggcucggacuuacagc

SEQ ID NO: 4195463 - RNA, 65 nt, Human
gcuguguccuaugaaagaggguuagguauccuggcagauacuuaacucucaaacauugguacagu

SEQ ID NO: 4195464 - RNA, 56 nt, Human
gcugugucggacuaugguucacagugugggagacacugcuguggcccccgacaugc

SEQ ID NO: 4195465 - RNA, 66 nt, Human
gcugugucucauuuccuccugcugugcccgugauguccuggcccagugugacgaggugaggcaggc

SEQ ID NO: 4195466 - RNA, 65 nt, Human
gcugugugcauuuuguucucauugccucgggagaggcagcaacucggagagaagagaaugucagc

SEQ ID NO: 4195467 - RNA, 58 nt, Human
gcugugugcucuggucuuucuuagcauaauggaguggaaaaagcuggggcaugcaugc

SEQ ID NO: 4195468 - RNA, 79 nt, Human
gcugugugggugaccaguguuuuccaguuugcccagaacuuucccaguuuugaggcuaaaaauucugcauccucacagc

SEQ ID NO: 4195469 - RNA, 96 nt, Human
gcugugugucuguaaaaugacugacagugguacuguaauuaaaaaauauauauuuauguaaauauagugacacuuauagucuggcggauggauugc

SEQ ID NO: 4195470 - RNA, 61 nt, Human
gcuguguguuuucagucugcauugucacccauaaugcaguacugauauaaacaaacacagc

SEQ ID NO: 4195471 - RNA, 93 nt, Human
gcuguuaaguauuaaagauucugaaagggguggggcuggcgucacguuuuucauugaucccugccccagcucugucagugucuagcacacagu

SEQ ID NO: 4195472 - RNA, 77 nt, Human
gcuguuagaaaaacaugcuuuuguuauagugugguuuucuuaaaaagagaauuguaauaauaauagcauuuggcagu

SEQ ID NO: 4195473 - RNA, 81 nt, Human
gcuguuagcauugguagguuaaauuuacguuccccagaucaaaaucuggagaaacaacacuugaugccuuugacuaauggu

SEQ ID NO: 4195474 - RNA, 81 nt, Human
gcuguuauacuucaaguaggucugauucaaccaacaauaaaaaugagaagguuaaguuuaaauguacaugaagcuugcagc

SEQ ID NO: 4195475 - RNA, 91 nt, Human
gcuguuauguagaugaaguguaacuuguaaugaguguuucuggaaaacaaaacauucaaaacccaguucagucaccugcagaacuuucagc

SEQ ID NO: 4195476 - RNA, 70 nt, Human
gcuguuauuagcugcuuucuuguugcaucuuaauuauuagguugaaaagaaagggcagacuuuuauaagc

SEQ ID NO: 4195477 - RNA, 63 nt, Human
gcuguuauugcauaaaaucagguuagagaugauggucacucugacuaaagugauagugauagu

SEQ ID NO: 4195478 - RNA, 75 nt, Human
gcuguucagcaauagagggugaauucagggcccauuuuucugugccugacugcagggccugacacccuugccagc

SEQ ID NO: 4195479 - RNA, 82 nt, Human
gcuguucauggguuuaauucagaggcuguaugacuagaucuuuccuaccuauaagaggucgcagcacuuaccugauagcagc

SEQ ID NO: 4195480 - RNA, 91 nt, Human
gcuguucauuuuuacucuaccucguuuuggaaucacuaauguggccaauuuauagccaaaaaucaguaucguagagugagcaaugaauggc

SEQ ID NO: 4195481 - RNA, 62 nt, Human
gcuguugcaaucaaggccauggcaaaauaacuggcucccaagguggcagugguggcagcagu

SEQ ID NO: 4195482 - RNA, 63 nt, Human
gcuguugccauuuuaugguuauuaaggcugcuagccuaggaacuaguagauguguaaacaugc

SEQ ID NO: 4195483 - RNA, 77 nt, Human
gcuguugcugcccccucuugugggcucaggucagcacagguaaucugcaggacuccaggggaggggaggaagacagc

SEQ ID NO: 4195484 - RNA, 62 nt, Human
gcuguugcugggaacgcaugucacaacaugauuuaauuauggcaaagcauucuuauaacagu

SEQ ID NO: 4195485 - RNA, 65 nt, Human
gcuguuggaagaggcaaugguguacugauacauuucagcugacauacuacagucucuuuaucagu

SEQ ID NO: 4195486 - RNA, 69 nt, Human
gcuguugucaucgccgagguccugcuccaaguucuccuugcaguuuagguccucugugcuggugaaggc

SEQ ID NO: 4195487 - RNA, 66 nt, Human
gcuguugucccuaggaguccuguguaggugcuguugggccuacagaggccucguagguacaacagc

SEQ ID NO: 4195488 - RNA, 66 nt, Human
gcuguuuccccaaccccacaaguaugucacaagcaguuuguuuauuugggggcugggggacauggu

SEQ ID NO: 4195489 - RNA, 64 nt, Human
gcuguuucccuccaggggguggauuucuagaucauucuucaggccccucggaggcgaugagagc

SEQ ID NO: 4195490 - RNA, 66 nt, Human
gcuguuucucccagucuccugagacagacugaagaggcccuuucucucugacugggagcugacagu

SEQ ID NO: 4195491 - RNA, 60 nt, Human
gcuguuucugaguagcuaggcuggccaguagcaagacuggaguuccugguucuuaacagc

SEQ ID NO: 4195492 - RNA, 85 nt, Human
gcuguuucuuacuaaaguagaggcauugaucagguaaucaguagaguugaucagauccauaaugaccuguggagugagaaacagu

SEQ ID NO: 4195493 - RNA, 69 nt, Human
gcuguuugaccuuagaacgugacacaagaagagcaauacuggcuccuccaauuucuuaaggagggcagc

SEQ ID NO: 4195494 - RNA, 64 nt, Human
gcuguuuggccagccugacugaaccugucaacagcuagaaagugaggucagcugggcuagaggc

SEQ ID NO: 4195495 - RNA, 73 nt, Human
gcuguuugguggcuguugcagaacugagggagggaugauuuguuugauuuacuauaagcagcacaaaggcagu

SEQ ID NO: 4195496 - RNA, 114 nt, Human
gcuguuuuaugugcuguauugauauuagaguauuuguuuggcuucaguggguacuuaauuauuuguuucuucuugacagugugcuagaauuaauucauagcauuaugaagcugc

SEQ ID NO: 4195497 - RNA, 60 nt, Human
gcuguuuugaagauguggucucagauccucagcccaccauucaaggucuucacagucagc

SEQ ID NO: 4195498 - RNA, 56 nt, Human
gcuguuuugcuagucccaccucaugaaaacuaccauaaggaaaggaucaaaauagc

SEQ ID NO: 4195499 - RNA, 90 nt, Human
gcuuaaaguucucccuccaggcccagggccaagagcgccucacaaagggcugcugccuugaacuuggccuggggaaaugagacccugagc

SEQ ID NO: 4195500 - RNA, 70 nt, Human
gcuuaaaucccaaugcuagaccugguggcuagaccuugauugccaccgggucuagcauugggauuuaagc

SEQ ID NO: 4195501 - RNA, 77 nt, Human
gcuuaaauguauucucuuuauaagauagaaaggaauagaacauacgcucccuauuuuacaaaugggaaugcugaggc

SEQ ID NO: 4195502 - RNA, 70 nt, Human
gcuuaagcgagcacauugagugaagaauagcaucuagcaguuugcucauucaaugugcauugccgauagc

SEQ ID NO: 4195503 - RNA, 77 nt, Human
gcuuaauauuauguagguuaggugguugucauccuaguugggagaaaacaaugaaaaaauuuacugugguguuaggc

SEQ ID NO: 4195504 - RNA, 61 nt, Human
gcccugccugacagagaagguucagccucacucccgcucaccacucacucaggcaagucgc

SEQ ID NO: 4195505 - RNA, 98 nt, Human
gcccugcucugaggaaggaggccaugcccuggucugagggaggaggcauaacccuggucugggggaggaggcauggccccuggucugagggaagaggc

SEQ ID NO: 4195506 - RNA, 65 nt, Human
gcccugcucugcagcuuggacucccucucaggacagugacagugagaugaggcagggccaggagc

SEQ ID NO: 4195507 - RNA, 97 nt, Human
gcccugcugcugacaauguugaagcagggucuggacaaccccuuguugagggcauuugguggccagaucuucuuuucagugucuucagaccuugggc

SEQ ID NO: 4195508 - RNA, 83 nt, Human
gcccugcuugucucagcugaugccauguggaacagugcuggccuggcagugcccuguggcuucagcaauccggcaggcaaggc

SEQ ID NO: 4195509 - RNA, 89 nt, Human
gcccuggagaagugguguccaggacccuauucucacucugaccugugguuucaguggacuuggguuuugaaggaguccuucucaagggc

SEQ ID NO: 4195510 - RNA, 55 nt, Human
gcccuggccauagcucuuguauccaugguugaacaguuggacacauggccugggu

SEQ ID NO: 4195511 - RNA, 63 nt, Human
gcccuggccuccuggaacaggcagcucuuuuucaccccccugcuugcuccugguccccagggc

SEQ ID NO: 4195512 - RNA, 68 nt, Human
gcccuggccugugaaucugagagcccuggagcccuggccugugagccugagauucccggagccguggc

SEQ ID NO: 4195513 - RNA, 57 nt, Human
gcccuggcgccgagcucuggggaaggcagaggcaugguucucaggcugggcggcugc

SEQ ID NO: 4195514 - RNA, 61 nt, Human
gcccuggcuccagcugccuguccuuguuuaagaugauggguugagguuggacccacugggc

SEQ ID NO: 4195515 - RNA, 70 nt, Human
gcccuggggugaucucuggcuuuccgaucuuugaagcccauaaaaagaggucccuccgguuaucuuuggc

SEQ ID NO: 4195516 - RNA, 95 nt, Human
gcccuggguuugcgggaagugggcuccagccaggauggcccagggaugggcaguccacagggccuuucuggugugggucuggugagccgaggggc

SEQ ID NO: 4195517 - RNA, 69 nt, Human
gcccugguuggcugagcagagucacucuuggucacagagaguggcccuguggggucagaugagaggggc

SEQ ID NO: 4195518 - RNA, 74 nt, Human
gcccuguccuccagauuaugcucucaguuauaaaagacugaggaggcuaauuugaggauuuccugcauaggggc

SEQ ID NO: 4195519 - RNA, 64 nt, Human
gcccuguggcaccaauacauuuuucuaaaguguagagaggugaauguggaugccacggucuggu

SEQ ID NO: 4195520 - RNA, 89 nt, Human
gcccuguggucuuuacagucucuguggcaacaauucacuaugccaucauagugggaaaugagcuacagauaaucuguaaccaaaagggc

SEQ ID NO: 4195521 - RNA, 84 nt, Human
gcccuuauaggcagagagggcagggcgguaaguccugaaaaaaagauucuaggagcccccacgugccugguucucugcgagggc

SEQ ID NO: 4195522 - RNA, 64 nt, Human
gcccuuaugagccagccucagaagucacgcagccuuacugcugccacacucugcugcucagggc

SEQ ID NO: 4195523 - RNA, 61 nt, Human
gcccuuauugugucuugguuuaucuuuugucaccuacuaaagagcauggcaagaaaagggu

SEQ ID NO: 4195524 - RNA, 55 nt, Human
gcccuucugguauaaaaaccgagccaagacucaguuaucaaauacuaugaagggu

SEQ ID NO: 4195525 - RNA, 72 nt, Human
gcccuugauguccugcaacugaaggagaaggauguccuuaaauuccuugcagcaggaacucauuuagguggc

SEQ ID NO: 4195526 - RNA, 56 nt, Human
gcccuugcccauggcucuuccuccauucuaccccagaaagcagcccuggcaagagc

SEQ ID NO: 4195527 - RNA, 56 nt, Human
gcccuuggaacagccuccugcucuggggcagaaucuggggugagguuguucugggc

SEQ ID NO: 4195528 - RNA, 71 nt, Human
gcccuuggcaaauucuccuuuaucuucugucucuuauagauaaaccaucaggcagauuugucaacagaggc

SEQ ID NO: 4195529 - RNA, 100 nt, Human
gcccuuggcacccacguaggcagggggcuguggcuguccaguccguggacuugcacuggauugggccauugccucuucuguucucgauggcgcuaggcgc

SEQ ID NO: 4195530 - RNA, 90 nt, Human
gcccuuggcaugcagugcaggggcugggccaggguagugacccuucacaccugugagucucggcuugccugauuauugggugccagcugu

SEQ ID NO: 4195531 - RNA, 59 nt, Human
gcccuugggagguuccacuggggcaaaagccagaguuuuguggaauguuccaaggaggc

SEQ ID NO: 4195532 - RNA, 62 nt, Human
gcccuuuggcaagucaggaaguugacauugaucuauucaucaacaccccuuugcuugcuggc

SEQ ID NO: 4195533 - RNA, 57 nt, Human
gcccuuugugauuuuagccaucauccguguaauggcuaaaauucagaagaaaacggc

SEQ ID NO: 4195534 - RNA, 69 nt, Human
gcccuuuuggguggaagcuguuauggcuggaccuuaaaugaucuucguagaguugucgcccacccuggc

SEQ ID NO: 4195535 - RNA, 89 nt, Human
gcccuuuugguuacagauuaucuguagcucauuucccacuaugauggcauagugaauuguugccacagagacuguaaagaccacagggc

SEQ ID NO: 4195536 - RNA, 57 nt, Human
gccgaagcugccgucugguccuguaacuugaugcccgugacaguuggcagcugcggc

SEQ ID NO: 4195537 - RNA, 58 nt, Human
gccgaaguucugggauuuccacagugccaaguuacuguaagagccuccggacugaggc

SEQ ID NO: 4195538 - RNA, 59 nt, Human
gccgaauucccaggucaggcugcagcagggcugguuccugaggccucuccugggcuggc

SEQ ID NO: 4195539 - RNA, 59 nt, Human
gccgaauuugaacuaagcucuacuucacucaaagucaguguuugguuucagaauugugu

SEQ ID NO: 4195540 - RNA, 74 nt, Human
gccgagaaccauuugcaguuacugagacaugcugggauaccucucaggguuuuagaagcagcaaagguaucugc

SEQ ID NO: 4195541 - RNA, 64 nt, Human
gccgagcacagugcagcugccuuaucagauggggcacacaggcuugcacagugagcaucucggc

SEQ ID NO: 4195542 - RNA, 123 nt, Human
gccgaugggcuggcgcuauggcucacgugggcgcaggaagggaagcuggauggaauacucgggaagcaaauuuucugugacaguucuggcgcccaugagcagaguugcucaguauccuucggc

SEQ ID NO: 4195543 - RNA, 81 nt, Human
gccgauguaagugacagagccaggucuugaacucaggccacccugacuccaaaguuugggcucuucccuaccaauccaggc

SEQ ID NO: 4195544 - RNA, 66 nt, Human
gccgcacuguuucacuacugggcagugaaaucagauuguacacuaguggcagcaguauuuauaggc

SEQ ID NO: 4195545 - RNA, 89 nt, Human
gccgcacuuguagggccgcucuccgguguggaucuucuggugcucuauaagcgaggacacguggcugaaggcggccccgcauugcaggc

SEQ ID NO: 4195546 - RNA, 68 nt, Human
gccgccagggccacugcaugagguucacacacccgcugauugugauucugccccuuggcucuggcggc

SEQ ID NO: 4195547 - RNA, 89 nt, Human
gccgccauggacccagggcugagcugugaccaugagggcuaucccgacgagcugccguggacccagggcugagccgugaccaugagggc

SEQ ID NO: 4195548 - RNA, 76 nt, Human
gccgcgaccgcucccucuguccgaggccggcuccgucgcgucgcggagcagcucgggcuacagagggggccgcggc

SEQ ID NO: 4195549 - RNA, 56 nt, Human
gccgcggcuccgcgcucccgcuggaugggguugcgcucgccagggaggggccgcgc

SEQ ID NO: 4195550 - RNA, 71 nt, Human
gccgcugccaccuccugcccugcccacuggggguccaggccucaggagguccgcccgggaggggcagaggc

SEQ ID NO: 4195551 - RNA, 82 nt, Human
gccgcugcuauuuccucagagucuaguaaauaauaagcaaucaauaccugcuguugacuuaccucuugagugaauucagugc

SEQ ID NO: 4195552 - RNA, 106 nt, Human
gccgcugggugcgcguggccgccagguccucguccaccuuggugcgcacaaaguagaacuucuugcccuggcacaggaucucagcggccaggcgggucucgacggc

SEQ ID NO: 4195553 - RNA, 89 nt, Human
gccgcuguguaacugugagccccuucugcagucagguuuccaggaugccuguggacagggcugugggaggagcagcaggccaccagggc

SEQ ID NO: 4195554 - RNA, 60 nt, Human
gccggagccgcgcgcgaugauucauugccccaauuaggggcucucugcagcgcgcccggc

SEQ ID NO: 4195555 - RNA, 118 nt, Human
gccggcagagauccugguggaggcagaucgcuuuugcgccaguagcuggugguggcuuuugauuuggaagcuuccucgcugggcagaggcagaccagcucuacuguagggcugcaggc

SEQ ID NO: 4195556 - RNA, 129 nt, Human
gccggcugggcgcugggggcgggcuggggacugcggagcccuuugcagcuuccaggagcuccugcuuccaggagccacacaggggcgggcagccgguucccgcccuucucaggugcgcacagccuuggc

SEQ ID NO: 4195557 - RNA, 58 nt, Human
gccgggaccuguuuuucaaaaggcauaauguuuuuugcuguggauggcagguccuugc

SEQ ID NO: 4195558 - RNA, 67 nt, Human
gccgggagaggcggcgcaggggcccaguccaccgagcgccgggcggcccuugccugcacuccucggc

SEQ ID NO: 4195559 - RNA, 91 nt, Human
gccgggauggucucgaucuccugaccucgugauccgccugcuuuggccucccaaagugcugggauuacaggcgugagucaccgcacccggu

SEQ ID NO: 4195560 - RNA, 105 nt, Human
gccgggcauaguggcacaugcuuguaaucucagcuacucaggaaagugaggcaugagaaucauuugaaccuggguggcagagguugcagugagccgagauccggc

SEQ ID NO: 4195561 - RNA, 57 nt, Human
gccgggcucagacaucccuccuggagcuuguauuuccagguccccucugggucccgc

SEQ ID NO: 4195562 - RNA, 67 nt, Human
gccgggcucuccagaauaugccgccgugggcuucggccuggcagcagggccccuggaggagccuggc

SEQ ID NO: 4195563 - RNA, 75 nt, Human
gccgggcuggggagcuggccgccuaugugcaggagaaccuggaggccgcacagcuggcuggcgagcuggcccggc

SEQ ID NO: 4195564 - RNA, 83 nt, Human
gccgggugcugcagcagugcgggcagcuucagaagcucaucggcaucucucuuggcagccugcgcgggcugcccaccaagugc

SEQ ID NO: 4195565 - RNA, 90 nt, Human
gccguaacugucacagacuggguggcucaagcagcagaacuuuaauuuuucacugugcuggaggccagaagucugagaucaagauguggc

SEQ ID NO: 4195566 - RNA, 84 nt, Human
gcucucuaccuccaugagcccucuucccauuuuauuccucacuugaaauagucugagauauggggcauugggugguaagggagc

SEQ ID NO: 4195567 - RNA, 75 nt, Human
gcucucugacucacuuagcagguuaauaucaagcauguuaauagcuuugccauugcucagugaacagauucuagc

SEQ ID NO: 4195568 - RNA, 56 nt, Human
gcucucugcaagucagcagccuccagaaccuggcaaugaguugaaugcaugagagc

SEQ ID NO: 4195569 - RNA, 57 nt, Human
gcucucugcuguauccuuaggcuuuggaacaguccccagcccauaguagcacgaggc

SEQ ID NO: 4195570 - RNA, 114 nt, Human
gcucucuggaccaggccuuguguuaaguccugaagacacagaaaaggcuaaaacagccccuggucuuaaggacucacagaucaugaggaggcgauagauacuggaauagaaggc

SEQ ID NO: 4195571 - RNA, 109 nt, Human
gcucucuggcagucaaggcgggaggacugaaggacaaucugguuccaacaccacaguguggcugccguuggcucuucaggccuccucaccucccacccucugccuuugc

SEQ ID NO: 4195572 - RNA, 72 nt, Human
gcucucuggcuccacuaguuuaauaccuuccuuucuucuuuguugaagaagggauggacgagagccagaggc

SEQ ID NO: 4195573 - RNA, 75 nt, Human
gcucucuuaggacuuuuucucaguaagcccugauaccuugaugugagaaggccaagaagaagccuauagagaugc

SEQ ID NO: 4195574 - RNA, 93 nt, Human
gcucugaaacgugaucuguacauuuauuuuugcagcauauugagguauucauuguggcuuaauaaaugacagauuuuuaugacuuuuaugagu

SEQ ID NO: 4195575 - RNA, 70 nt, Human
gcucugaaccugugucuuggccacuaggagugccacaccuggcacugcccccugcccaggacuucacagc

SEQ ID NO: 4195576 - RNA, 57 nt, Human
gcucugaugccagccgcuuccucuuggucuagagccaaggaagcccugggucagagc

SEQ ID NO: 4195577 - RNA, 64 nt, Human
gcucugcagauguguucugaagcucaggucacagauggagcugugagggacacauugcuagggc

SEQ ID NO: 4195578 - RNA, 79 nt, Human
gcuugauauauuuuuaaaauuggucuuagcuguuauacagggauaauccauaauugagaccuuaaaagguaugucaugu

SEQ ID NO: 4195579 - RNA, 124 nt, Human
gcuugaucgucacuguccuuucuaggcugagguugaugccaggggaagcugcuguggcacugggcuucuggugucagcguaggagacagggaucuaggacaacagggaccagguggcgacaugc

SEQ ID NO: 4195580 - RNA, 80 nt, Human
gcuugauugagagaaacuuguuuuaaguagguagcgugaccagccacaguugaggacuuaaacaaaacucuuuguuaggu

SEQ ID NO: 4195581 - RNA, 103 nt, Human
gcuugcaaaccaggcuggagauggcaccuuccccagagcucaggaauucugggugaggauugaguguggggaaugucaugagauuuagccugcuccuguaggc

SEQ ID NO: 4195582 - RNA, 77 nt, Human
gcuugcagagcagagaaagucuauucaggugaaaaaugguucauuuuugacucauugauuuucucugcucauugagu

SEQ ID NO: 4195583 - RNA, 129 nt, Human
gcuugcauugcuacagugaguuuuaaaaggcuugauugcuacuuucaguuugguucauugucuuagcugagcacuuugacacuuggaagcuuggcaacauuaccuggaccaucguggcugugcagaggc

SEQ ID NO: 4195584 - RNA, 89 nt, Human
gcuugcauuuguguguguggaguugacagaaaccaccacauaggcauguguauacuucuuccucacacucucacccauacaagcauagc

SEQ ID NO: 4195585 - RNA, 95 nt, Human
gcuugccaaaugccuuuggaaaccaggcuuugagacgccuuugugacucuuguuugcauguuuuuuggcuaugauaucgaggcauuugguucugc

SEQ ID NO: 4195586 - RNA, 73 nt, Human
gcuugccacuggcuggccaugcgggcgggcaggcuagacauucuugccgcgcaggcgcaguucguggcgucgc

SEQ ID NO: 4195587 - RNA, 55 nt, Human
gcuugccggagcaaacgugcuugaacgugucuugguucuugcagccccagcaggc

SEQ ID NO: 4195588 - RNA, 59 nt, Human
gcuugcucuggcucaaaccaccggcucuucugaccauggugggucugaccauggugggu

SEQ ID NO: 4195589 - RNA, 58 nt, Human
gcuugcugcaaccaacccugacauuucagguuggaaagaaggcuugguugcagcaagc

SEQ ID NO: 4195590 - RNA, 64 nt, Human
gcuugcugucaagcguaggcuuuuauugcuuuguuuuggucagugcaugcuugacuuagcaagc

SEQ ID NO: 4195591 - RNA, 89 nt, Human
gcuugcugucuacuguacuuauuuuaugucagcacaguguauaauugauugcacauacaugaaauauguagcacacuggacuuccaagc

SEQ ID NO: 4195592 - RNA, 64 nt, Human
gcuugcugugcccccugccugccccaguacgagcgggcccuggacguggcggcagagcccaagc

SEQ ID NO: 4195593 - RNA, 55 nt, Human
gcuugcuuaaccaaaacuagucaucaguuuucugaacugccuugguucaguaggu

SEQ ID NO: 4195594 - RNA, 60 nt, Human
gcuuggaaaauaaaaguucaggacucuguuuuuauagcuacagucuuguauuuuucaagc

SEQ ID NO: 4195595 - RNA, 72 nt, Human
gcuuggaaggcugugcaguguuugcauucuaagggcugcggagacagcuggagaucugcucagcccaccagc

SEQ ID NO: 4195596 - RNA, 76 nt, Human
gcuuggaugugcgauggaagcagacagguaauuccuuccuugggggcaaugaccuacugcuuucugcauaacgugc

SEQ ID NO: 4195597 - RNA, 74 nt, Human
gcuuggcagguaugagugagaaaugaaauuggcuuaagccacugauaucauuuguuacagccacauaccugagc

SEQ ID NO: 4195598 - RNA, 56 nt, Human
gcuuggccagcagccgggaugcccacuucugcuugaucucgggcuucucgcccagc

SEQ ID NO: 4195599 - RNA, 71 nt, Human
gcuuggcuccuucuggaggccauagggaaggaucgguuuccuggcuuuuccagcuucuagaggcagccugc

SEQ ID NO: 4195600 - RNA, 66 nt, Human
gcuugggcaggggaaacagcugcccaccagguuuuccuggacagcagugcccaccugccuacuagc

SEQ ID NO: 4195601 - RNA, 67 nt, Human
gcuugggcuggccggacaggccagaggcucugggcccggggccugcuggacauuggccggccucagc

SEQ ID NO: 4195602 - RNA, 72 nt, Human
gcuuggggaauggccauuccagauugcucugaagugugugucuggacaggacuauuucuaacaugaccaagc

SEQ ID NO: 4195603 - RNA, 77 nt, Human
gcuuggggaugcugaagugaagugaucuugaacagaugucagcaucaggaccuguaccucagcaucuaacaccaagc

SEQ ID NO: 4195604 - RNA, 75 nt, Human
gcuugguucaaaacauggaaggguguucugauaaguauauacauaagagcacacaccuuuccuuuugccucaagc

SEQ ID NO: 4195605 - RNA, 67 nt, Human
gcuuguaaauuggaaaucaaucaagacagcuuuuauuuuaguuccugauggcuguccaauuacaagc

SEQ ID NO: 4195606 - RNA, 75 nt, Human
gcuuguacguggauuggggacaauguuuucuagccucuccaagggcugaguuccugccucacucuauucguaagc

SEQ ID NO: 4195607 - RNA, 74 nt, Human
gcuuguacugugguaugacgcauauuucuggaguuuggcaaaccccagaaauaugugccaugccuuagugaagu

SEQ ID NO: 4195608 - RNA, 56 nt, Human
gcuuguaggaggcaguggggaguggcugcccaaacggccccacuguccccacaggc

SEQ ID NO: 4195609 - RNA, 69 nt, Human
gcuuguccauuucuuuaucucuugucaccauaugcaugauguacuaaccaggaggaaaaaaugacgagc

SEQ ID NO: 4195610 - RNA, 65 nt, Human
gcuuguuaaacacagugugugcagucggacggagucccggccgugauucaugcacuguacacagc

SEQ ID NO: 4195611 - RNA, 70 nt, Human
gcuuguucuaggagaugagcugugaaaagcauaaucaauuauguuacuucuuauuucuuacauuucaagu

SEQ ID NO: 4195612 - RNA, 58 nt, Human
gcuuguucucacuacugcauggggauagggaguacucagaccagugggauaaauaggu

SEQ ID NO: 4195613 - RNA, 92 nt, Human
gcuuguugagcagguacaaugcacuagggacugugugagggacuugauguauauuagcucuuuuaauccuuaggacagcccugugaacaggc

SEQ ID NO: 4195614 - RNA, 70 nt, Human
gcuuguugauguggacgucuggaacuugaauagaagacauuucuuauuucagaugcauccauuagcaggu

SEQ ID NO: 4195615 - RNA, 93 nt, Human
gcuuguugcaguggcacuucuugggccucaccccagacccaaagaauuggaaucucuggggaugaggaccuagauggugcaguuuuaacaagc

SEQ ID NO: 4195616 - RNA, 95 nt, Human
gcuuguuuuaaguuaggggugauaacagauauaggcagaacuuugcaauguaaauguuuagucuuauuugggcacugcugaauuuguuuccgagc

SEQ ID NO: 4195617 - RNA, 62 nt, Human
gcuuguuuucaucuuuaucugagacaugugaugaacugucugaaggcagguggagaacaggu

SEQ ID NO: 4195618 - RNA, 129 nt, Human
gcuuuaaauuaaaaccugaaaauaaauucccaucaguuaagaagagcuaggcaucuccuugugaauuguccauagcuguucacaagcugauugucuuucuuuucugcagggauuucagggaaaauaagc

SEQ ID NO: 4195619 - RNA, 64 nt, Human
gcuuuaagacugauguccagucccauggggaacagaagccacauggggccgauauuagcucagc

SEQ ID NO: 4195620 - RNA, 82 nt, Human
gcuuuaagcugucuauauauugcuugaauaaucugguaaaauaucuuacauauuauucauguagauucaguauaguauuugc

SEQ ID NO: 4195621 - RNA, 85 nt, Human
gcuuuaauaaagagccucuguguuucagccucaugaauauguuuaaauuucaaaggaccuggaucacagagaucugcaccagagc

SEQ ID NO: 4195622 - RNA, 87 nt, Human
gcuuuacauaggauuucucuuuuugcaacuucauuguggauuuuaacaggaagggagaagaaagaaauucuauugcacacguggagc

SEQ ID NO: 4195623 - RNA, 60 nt, Human
gcuuuaccauacaucaaaauauuuuauacauuucuaggaauaaaaacugugugguaaagc

SEQ ID NO: 4195624 - RNA, 56 nt, Human
gcucagggaaugagaagauguugauuucacuuauuuucuucuuugaucuucugggc

SEQ ID NO: 4195625 - RNA, 55 nt, Human
gcucagggagagagggcagccgcccagcucgggccccaugccaucccccuugggc

SEQ ID NO: 4195626 - RNA, 87 nt, Human
gcucagggguagucgguugggugggggcccgcugaacugacaagcggcauuucagcuccuuucuuccaccagucggaaccccagagc

SEQ ID NO: 4195627 - RNA, 55 nt, Human
gcucagguagaugggguuguccaccacccgcuggccagccugcaucaucugcagc

SEQ ID NO: 4195628 - RNA, 115 nt, Human
gcucagucuucugagucucaaguuccgugucuagcaguugaaaguaaugcggugcugacggcacugagguuuuuaguguuaaauggaugagcacugggaaguguuuuugcugagu

SEQ ID NO: 4195629 - RNA, 69 nt, Human
gcucaguguuucugguagaaaaggcaauuuucaagacugaaauagcaauuucuuagccaucacuggagc

SEQ ID NO: 4195630 - RNA, 81 nt, Human
gcucaguguuucuguggauggcaagguggugcuuuugguuuuguccacagagucuuccuucucuucugcugaauucugagu

SEQ ID NO: 4195631 - RNA, 57 nt, Human
gcucauaccaacagcuuuccucacccagguuccuggcuggcccuguaggaugugagu

SEQ ID NO: 4195632 - RNA, 65 nt, Human
gcucaucagccagcagaugcuccccucuugcacaaaacugagcagagguguccuguagcuugagu

SEQ ID NO: 4195633 - RNA, 90 nt, Human
gcucaucucagaggugagaaagaagaguguugcuaguggaugggcggggccuucccuccacuugcccucuucugugcucaccuccauagc

SEQ ID NO: 4195634 - RNA, 55 nt, Human
gcucaucugccccaggagaucccauuaagcugcggugcucugggcagcagagggc

SEQ ID NO: 4195635 - RNA, 62 nt, Human
gcucaucugggacugcagaucuucuggcacuggagcaucugugguccaucagaagaaugggc

SEQ ID NO: 4195636 - RNA, 69 nt, Human
gcucaugauucugcaggcugugcaagaagcauggcaucagccucugcuucuggugaggccucaggaagc

SEQ ID NO: 4195637 - RNA, 56 nt, Human
gcucaugcguucagcagaggcuuauugugccaggcacugagcugagcuccaugggu

SEQ ID NO: 4195638 - RNA, 67 nt, Human
gcucaugcucacugggcucugggacagcauuuucuccuuucugccuccugcccagaugagugauggc

SEQ ID NO: 4195639 - RNA, 79 nt, Human
gcucauggcucagauuuuuguaggcuuugcaaauccuccauucugucccagcagguuuccgaucauuugagacgagagc

SEQ ID NO: 4195640 - RNA, 61 nt, Human
gcucaugucauggguaauuuuaguucauaaaauguauugaacuguugcuuguaauaugugc

SEQ ID NO: 4195641 - RNA, 58 nt, Human
gcucauuaggggacuggcaacaacaaaauuaacauugagugcuaaguccuuuagaggc

SEQ ID NO: 4195642 - RNA, 128 nt, Human
gcucauuguuuuguuuuuguuauguuuauuuuuguguugaucuuuucuauuuaugguagugguauguaccuuuguuuuaauguaaaagaauaauaugguuuaaagaaaaauauuaaggaaauaagagu

SEQ ID NO: 4195643 - RNA, 55 nt, Human
gcucauuuguuacgcagcagaugcacgcugacaucuguuuuguaccagauacagc

SEQ ID NO: 4195644 - RNA, 74 nt, Human
gcuccaaauucuguguucaaacucaguccuaguuucuggcugaguuucaugaauucaugggacaaauuggaagc

SEQ ID NO: 4195645 - RNA, 68 nt, Human
gcuccaagaagugucagcuuuuuaaauuauaaauuagguuuuuuaaagagcaugggcauuuaaggagc

SEQ ID NO: 4195646 - RNA, 73 nt, Human
gcuccaaggauuagucuccccgaauggcacuauguucuagaucacagguuuccagcauggggaaggcaggagc

SEQ ID NO: 4195647 - RNA, 88 nt, Human
gcuccaccaccugcugucuggauaauccuaggagguucaccucacucucugaaccugcuuccuuuuauauuaaacaggaggcuggagc

SEQ ID NO: 4195648 - RNA, 60 nt, Human
gcuccacuaguuggguaggacugcugcugcgugcaugcacagugcugccuaauagggagu

SEQ ID NO: 4195649 - RNA, 56 nt, Human
gcuccagaguguggcaucuggguccaauaauggccauacagagccccaucuguagc

SEQ ID NO: 4195650 - RNA, 75 nt, Human
gcuccagcaaauuuuaauacugcuuuaaauaucaugacaccaugaacucuaaagaauugaaaagugcuugugagu

SEQ ID NO: 4195651 - RNA, 67 nt, Human
gcuccagcaagggucuugggguugauugucauuggcuuggcuugggucacaugcccauuacuggagc

SEQ ID NO: 4195652 - RNA, 59 nt, Human
gcuccagcgccuccuggaccuccucugccacucgcagggagcccuccaggcccugccgc

SEQ ID NO: 4195653 - RNA, 89 nt, Human
gcugcuuggguccuucagagaagugcacaaaaucagcugcaugcugguuuuacagcucugugcaugacucugaggaguuauaggguagc

SEQ ID NO: 4195654 - RNA, 65 nt, Human
gcugcuuugacauccuuguuccucaguuuguagaugacaggguugagaacaggugugagaauggc

SEQ ID NO: 4195655 - RNA, 56 nt, Human
gcugcuuugugaaaaucauucaucagauagugauuguuuuauauaagcagagcggu

SEQ ID NO: 4195656 - RNA, 77 nt, Human
gcuggaaaccaacaggcagcuagauuuauaacaacuguuugcgauuguuuuggaauuuggcuuccugagaggucagc

SEQ ID NO: 4195657 - RNA, 79 nt, Human
gcuggaaaccguuaggguacacaugauggaagguucagaaauugagggcuuucuaagugauucuagcuggacuucuggu

SEQ ID NO: 4195658 - RNA, 84 nt, Human
gcuggaaauguguaagggugugcacuaagaauuuuccagacaaagaagaaagggaaaagcaugcuacuuuauauagguuugagc

SEQ ID NO: 4195659 - RNA, 59 nt, Human
gcuggaagccguuucacccugaagccugaaggggcaaaggcagaaagcgguguucuagc

SEQ ID NO: 4195660 - RNA, 74 nt, Human
gcuggaaggcuaggcucaguugggucucucucucucucucuacauggguccaagggccacauagucucuccagc

SEQ ID NO: 4195661 - RNA, 95 nt, Human
gcuggaauucaaagcaagccuuagaggcuaagcacuggcauuucuguacccaucuugggggagagcugguagcuggcuccagggaagcauccagc

SEQ ID NO: 4195662 - RNA, 80 nt, Human
gcuggaccacucucugugguggggucaucgucagaugcuuaccagcaucccuggccuggaaccaccagauggucagcagc

SEQ ID NO: 4195663 - RNA, 61 nt, Human
gcuggacccugaaauaaggaaaugguguggauacugucucucuagcaguucagggaccagc

SEQ ID NO: 4195664 - RNA, 67 nt, Human
gcuggacgggcucugcuugccugcugugcaccugaggaguaggguuuccagguuagagagguucugc

SEQ ID NO: 4195665 - RNA, 96 nt, Human
gcuggacuccgggcgcggguggcgcggcaaaacuccgggcgcagguggcgcggcugagaggggcgcgcagcucgcgaaaugcccggcgucaaaggc

SEQ ID NO: 4195666 - RNA, 69 nt, Human
gcuggacuggcucugcccaggaaggaccuaggguucacuaagcccuggugggcaggagugagacccagc

SEQ ID NO: 4195667 - RNA, 58 nt, Human
gcuggagaaaugaaaagcuuugugaucaugaagaaacauaauguaugcauuuuccagc

SEQ ID NO: 4195668 - RNA, 74 nt, Human
gcuggagaguaguaagcaguuaguggcaaagggguuuauaaagaaacccuguggacucucuagugcuguccagu

SEQ ID NO: 4195669 - RNA, 58 nt, Human
gcuggagcauaguacuaaaguagugcacuauaagucuauuauuauuucuguguccagc

SEQ ID NO: 4195670 - RNA, 55 nt, Human
gcuggagccauuggcuuggccuuugugggguuugacauaagaagguggcuccagc

SEQ ID NO: 4195671 - RNA, 58 nt, Human
gcuggagccggcgagccccagcccagagaacaaaaggccucgcuagccggcgucccgc

SEQ ID NO: 4195672 - RNA, 60 nt, Human
gcuggagcugcagccugggccuugguuugauccuuggccuuggccuuuggccagcacagc

SEQ ID NO: 4195673 - RNA, 77 nt, Human
gcuggaggcaggaggugggagccuccagugguagggccccagacugccccacccuugacucuccuuccugucccagc

SEQ ID NO: 4195674 - RNA, 56 nt, Human
gcuggaggcaguucagacaccauguggaggugcacaaggucugaaugccucugagc

SEQ ID NO: 4195675 - RNA, 61 nt, Human
gcuggagggaagggaggaggaaaagccucaguaagaggacuccacccucucugcucccagu

SEQ ID NO: 4195676 - RNA, 58 nt, Human
gcuggagggguaauaggauggggcagacaguuauaauccuccugugacuccuccaagc

SEQ ID NO: 4195677 - RNA, 76 nt, Human
gcuggaguaggaggcgggagcaugaagucuccugggccccgcccgccaccucgcccugccgccccugcucagcagc

SEQ ID NO: 4195678 - RNA, 57 nt, Human
gcuggaguccaguggcaugaucauagcucacuauaaccucaacuccugggcucaagc

SEQ ID NO: 4195679 - RNA, 66 nt, Human
gcuggagugaagagaaggcugcuggugccugaauucuuggcucuagaaacuccaucucacuacagc

SEQ ID NO: 4195680 - RNA, 77 nt, Human
gcuggauaauaguggaggccuguugugugcauuguaggauauuuaguagcauuucuggccucuacucacuagauagc

SEQ ID NO: 4195681 - RNA, 67 nt, Human
gcuggaucagggaaggugggcauggcccuugcagcucuugcuguuucaugcagcuuuuccauucagc

SEQ ID NO: 4195682 - RNA, 55 nt, Human
gcuggaugaggcucaugcacccugcgacugaugcaccuggcugagucucauuugc

SEQ ID NO: 4195683 - RNA, 65 nt, Human
gcuggcaacaagaaaggcagagggccuuaaacguggaaaggccuuuaaagaaagucuuguccagu

SEQ ID NO: 4195684 - RNA, 63 nt, Human
gcuggcaagcaggccuggcuggaccgugggaugcagcccauaggcccaggccugccuugaggc

SEQ ID NO: 4195685 - RNA, 57 nt, Human
gcuggcaaugucugucuguaguguauucuuaacaauacagauuagcacaaugcaggc

SEQ ID NO: 4195686 - RNA, 62 nt, Human
gcuggcaggaaggcauuuagacacucaacauguauugauuuguuuuuagacuuucugcagac

SEQ ID NO: 4195687 - RNA, 92 nt, Human
gcuggcaggcaggagaguuuccggcugaggacaaggaacccguugaggcagacagcagggcucugugcagcaggagaccggcuuguuugugc

SEQ ID NO: 4195688 - RNA, 69 nt, Human
gcuggcaggcugcaggcagagccccagggagcgcuuucuagggagaagcucugucugucugccuauagu

SEQ ID NO: 4195689 - RNA, 110 nt, Human
gcuggcauugaggcgaacauaccugugaccuauggaauuggcagccagaggggagacgagagcacuggcugucaauucauaggucagagcccugugcacucggucucggc

SEQ ID NO: 4195690 - RNA, 81 nt, Human
gcuggccagcccucggguucugggagcucugaccuucaggauugcugaggccaaagcacagagcuggaagggcaggccugu

SEQ ID NO: 4195691 - RNA, 63 nt, Human
gcuggccccaagucccauggcuaguggcgagacuguaacuggccaugaacuugggaucucagc

SEQ ID NO: 4195692 - RNA, 63 nt, Human
gcuggcccuguuggcaguuucaucaguugucagcuucugagacaguaucgccccaaggcuagc

SEQ ID NO: 4195693 - RNA, 67 nt, Human
gcuggccuggggugcaggcuggcucaugaccugccucuggcacagcuugggccccaucauucucagc

SEQ ID NO: 4195694 - RNA, 59 nt, Human
gcuggccuguccugacccagccuugguaucuccggguugugaaccacagcaggccuggc

SEQ ID NO: 4195695 - RNA, 55 nt, Human
gcuggccuucucacugaucucuggguguguaaacugggcuuaugaggaggcuugu

SEQ ID NO: 4195696 - RNA, 84 nt, Human
gcuggcgguaaguuggagagaaucugaaccugcuccuauuuucaauaguagacaaauuucuucucucaauauuauugcucaugc

SEQ ID NO: 4195697 - RNA, 85 nt, Human
gcuggcggugcugaacuccugcaggccagaggggugagccugcuggaaggggcuccagcuggggugcaggaagagcauucccagc

SEQ ID NO: 4195698 - RNA, 77 nt, Human
gcuggcucagguggcuuggcagguaagcaacaggcagggucuuagguuaagagcucuuaucucuaagcacagccagc

SEQ ID NO: 4195699 - RNA, 104 nt, Human
gcuggcuccauuuucugcugauauauaguugugacccaggacaauuuauuuaaccucuuuggaacuugguuuucuaauguauuaagggaggugguuaugccagu

SEQ ID NO: 4195700 - RNA, 64 nt, Human
gcuggcugccagguacacaaguagccaggaucucugcuaggucccuucuguccuggucuuuggc

SEQ ID NO: 4195701 - RNA, 70 nt, Human
gcuggcugccuuugacuuaagggcucaguugguuaaagcccaaagcugaggcucaagucauggguccagu

SEQ ID NO: 4195702 - RNA, 59 nt, Human
gcuggcuggaguaaggagggaguaaguuucacuccguccuuugcuuccuggccuugggc

SEQ ID NO: 4195703 - RNA, 83 nt, Human
gcuggcuucaugagcuuucagaagaggaccuuuccagaaugagaaacuuggaaucuuuaggaagcacauagacaucaguuagc

SEQ ID NO: 4195704 - RNA, 59 nt, Human
gcuggcuugauaguuucugcuuccuaccucuuggaagucagucaccauuuaagaacagu

SEQ ID NO: 4195705 - RNA, 55 nt, Human
gcuggcuuuaucgucagacuccggaaaugcuagaaccugaucauaagagaccagu

SEQ ID NO: 4195706 - RNA, 60 nt, Human
gcuggcuuuguggucucuccucccugugcagguaggguguggaggguaaucagagucagu

SEQ ID NO: 4195707 - RNA, 57 nt, Human
gcuggcuuuugaagucuagcuaugucauuaaauuaguuaugugauugaaagccaugc

SEQ ID NO: 4195708 - RNA, 80 nt, Human
gcugggaaacacugugaagauuuggcaugcagaacacagacguaauuuuugcugcuuucuaucagaagagguuuuauagc

SEQ ID NO: 4195709 - RNA, 89 nt, Human
gcugggaaacuucccuucugcagaucuuuggucuuaucucuaagggcaagauccaaccgguuugcaaagggagggacuuaguucccagu

SEQ ID NO: 4195710 - RNA, 58 nt, Human
gcugggaacacagccaugagagauucugacaagucuugacuucauucagcuucccagu

SEQ ID NO: 4195711 - RNA, 96 nt, Human
ggaaggugccagggagcagugagggaucaugggcgugggacucuaacugcaucgccaucucagcugcuggccccacaugcuccaagcccaccuuuc

SEQ ID NO: 4195712 - RNA, 76 nt, Human
ggaagguggggauggaaugggaagcagagccaugagugagcagaggcucuaauccccuccacaagcuccauuuucc

SEQ ID NO: 4195713 - RNA, 104 nt, Human
ggaagguugguuguguggcugggucgugugcuuugcggggaaggcauguguugcuuuauggcuuccccacaaagcacacaaccgggucacacaacugaccuuuc

SEQ ID NO: 4195714 - RNA, 72 nt, Human
ggaaguacacuuggguugauuuucaauuuauuauugcagugauuucagagaaugaaccuaaucaacugaucc

SEQ ID NO: 4195715 - RNA, 129 nt, Human
ggaaguagcuguagaugcccacaccuauggcauagaggauggcuguaaauucagagauggacaacugaguccaaauccugcaccuacaguuuucuagcugugccaccaggacggguuccccagccuuuc

SEQ ID NO: 4195716 - RNA, 65 nt, Human
ggaaguagguaguuuccccaauuuauagcugaggcaacugagcucagggaaauucacuugcuucc

SEQ ID NO: 4195717 - RNA, 89 nt, Human
ggaaguagucguugauuugggaauggucuggcaacaugaaagagauugucugcuuccuugaucauucccaaaacuuagggagcuuuucc

SEQ ID NO: 4195718 - RNA, 107 nt, Human
ggaaguauggauggaagcauuguagcauuuuuacuugucucaaaggaaaugggauuugaugaaaaccauuagcuuaggcaugaagagaagcagagcuuccugucucc

SEQ ID NO: 4195719 - RNA, 56 nt, Human
ggaagucaggccuccacagggucuugcaggacuggggcucugucuggccuacuuuu

SEQ ID NO: 4195720 - RNA, 80 nt, Human
ggaaguccaagaucaaggugucagcagguuucauuuaucugaggccucucuccuuggcuuggagaugaauguuuuuuucc

SEQ ID NO: 4195721 - RNA, 61 nt, Human
ggaaguccugcuggaucaaccucaccugcugcuggggaggcugccauccuucaggaagacc

SEQ ID NO: 4195722 - RNA, 66 nt, Human
ggaagucuuggcagugaugcagcuuguucauuggcugaacagcuauaaucaucuguccaaacgucu

SEQ ID NO: 4195723 - RNA, 104 nt, Human
ggaagugaagguuugugcggaggagggagcuggaagcucuuccuuucaccgacacagaggaaagugcccucccgcccccucccaagcacaccccucugcgcucc

SEQ ID NO: 4195724 - RNA, 130 nt, Human
ggaagugagcaucaugauagccguuuccugccuuguuuauggcgcacuccgacucucccaccagcgccgagguggaaagaggaagugcccagcagggcgagggagacuuggggcuggcuguguuccucuc

SEQ ID NO: 4195725 - RNA, 104 nt, Human
ggaagugaguaacugccucuccagaccugcagacgacagccccgcugccaaggauagaauuaggaagaguggccaggccgacugccaggcugagggcuacuucc

SEQ ID NO: 4195726 - RNA, 97 nt, Human
ggaagugaugaugaugauuugaaaccaguuucuugauuuuuuaagaucauaaggugucucgucuucaaaucauuuaaauacauccaauguagcuucc

SEQ ID NO: 4195727 - RNA, 86 nt, Human
ggaagugcuggcgcccacuccuggaaaggcugagacagcacaggucccaaagcccagaggcugggcgugcauuacucagcaaaucc

SEQ ID NO: 4195728 - RNA, 79 nt, Human
gcugggugaccagagcuaggcagggguuucuucauguugaaaugaaacaguccucuuuauuuagucucagggcuccagc

SEQ ID NO: 4195729 - RNA, 66 nt, Human
gcugggugcuguucaucaucaugagugcugaaaugggagccucugagccugugugcggcacccggc

SEQ ID NO: 4195730 - RNA, 64 nt, Human
gcuggguggaucggaggcucugccaggcccaagacaccugcagcacgcaucccaccaccucagc

SEQ ID NO: 4195731 - RNA, 64 nt, Human
gcugggugggugcucgaggagagcuuauuuacucccuugcaaugcuuccucagccucaccuagc

SEQ ID NO: 4195732 - RNA, 82 nt, Human
gcugggugucuuuggcuugggucucucaugcaguugcugucagauaguggcaggagcagucaggggcagcuggacaccaugc

SEQ ID NO: 4195733 - RNA, 119 nt, Human
gcugggugugguggugcaugcuuguaaucccagauacuuggaaagcugaggcaggagacucgcuugaacccagggguuggagguugcagugagcccagaucgcaccauugcacuccagc

SEQ ID NO: 4195734 - RNA, 70 nt, Human
gcuggguuccucuggaggcucuaggagagaauucccuccugaagcuuuuccagcugcuagaggagccugc

SEQ ID NO: 4195735 - RNA, 73 nt, Human
gcugguaaaauaaagaguuuaguuugggauuuuugagauaucuuggaacauccaggacagauauuuugaaggc

SEQ ID NO: 4195736 - RNA, 61 nt, Human
gcugguagcuggcuuugaucuucccaucuuauuagacaggaaacaaggcuagcuugaaggc

SEQ ID NO: 4195737 - RNA, 61 nt, Human
gcugguaggagagggcuuaggggacuuuauggaauucccagagauuuccucuccuuccugc

SEQ ID NO: 4195738 - RNA, 57 nt, Human
gcuggucccaauguguuuccuucuauucuuuugacaggaagcuccuggagagccagu

SEQ ID NO: 4195739 - RNA, 81 nt, Human
gcuggucggagauguugcaacuugaauaggcauuucuaggauaccauggaaaugcacaaaguaaguguaauugcuaccagu

SEQ ID NO: 4195740 - RNA, 61 nt, Human
gcuggugaaacccacagagacccucacgcugaccugcacucucucuggguucucacucagc

SEQ ID NO: 4195741 - RNA, 80 nt, Human
gcuggugaggauggugagcuguuaagauugcaagaugauacagccacuuuggaagauaguucggcaguuucuuacaaagc

SEQ ID NO: 4195742 - RNA, 56 nt, Human
gcuggugaucuugggcaagucacuuaucucugugaagucccaguggauucaccugu

SEQ ID NO: 4195743 - RNA, 71 nt, Human
gcuggugcugcgaugauuuuacagagaagagacauuccuacuguuuacagcuuugggucauacagacaagc

SEQ ID NO: 4195744 - RNA, 84 nt, Human
gcuggugcuuuuaugaaucuagagggcucugaagagaauaucuuuaggauaauuccuuaauaucccuuuuggaagaguauuagu

SEQ ID NO: 4195745 - RNA, 61 nt, Human
gcuggugucaggggaugugcugguggccucaaggggccacacugcccaccucuguuccugc

SEQ ID NO: 4195746 - RNA, 56 nt, Human
gcuggugugcaguucugaugacaaccaaggcaacuucacacaugacugcacaaagu

SEQ ID NO: 4195747 - RNA, 60 nt, Human
gcuggugugugaaccuagggacauuauuucaccuuauagagucucaguuuccacaucugu

SEQ ID NO: 4195748 - RNA, 78 nt, Human
gcugguguucuuggaaaaacacgauagugguugaaggaaaaggaaaugcagccaucauuuguuccaagggaacuaagc

SEQ ID NO: 4195749 - RNA, 57 nt, Human
gcugguucaccuggcuccucccaggucaagcugggaacacgaaagaaggaagccagc

SEQ ID NO: 4195750 - RNA, 70 nt, Human
gcugguucccugccauaccugaaggcacagaacucauuccauugcuugcugugguuggcugguaacuagc

SEQ ID NO: 4195751 - RNA, 77 nt, Human
gcugguugauaaaucugugggagggagaaaucucauugggaagagaugcacuacccuguauuuagagaugcaccagc

SEQ ID NO: 4195752 - RNA, 124 nt, Human
gcugguugccauguggagaauggagcugacagcggggcugcuguagagaacauguugagggcgggcagauggucccagcaaggugagggauggcaggaccugcaucagugcaguggcagugggu

SEQ ID NO: 4195753 - RNA, 77 nt, Human
gcugguuggagucauggugugguuucucuuuaucuguuuauuugcucaagguacaugcauuuaugucucccaccagc

SEQ ID NO: 4195754 - RNA, 76 nt, Human
gcuguaagaaugcuuugucugcuccagacuucccgguccugggagaucagguggucaggcaaaacauccagaccgu

SEQ ID NO: 4195755 - RNA, 67 nt, Human
gcuguaagcagacucccggccagcucaaguuuccucaccugggaagaggcgggaggcuguuuaccgu

SEQ ID NO: 4195756 - RNA, 79 nt, Human
gcuguacccggaaguuccagugauauaaaacuauuuugaguuuucaaccaucauaaggaacugugacugagguuugagc

SEQ ID NO: 4195757 - RNA, 128 nt, Human
gcuguacuccagccugccacacuucugaaggcacucagugcuuaguguguuuugggcucuguauccugagaccucccacagcaugcaggccugacacuugccguggguguggagguguggaaaguggc

SEQ ID NO: 4195758 - RNA, 61 nt, Human
gcuguagaaaccaucucacugcucagaucuuaaaaucuguagccaagagaggcuuugaagc

SEQ ID NO: 4195759 - RNA, 70 nt, Human
gcuguagguaauuacuagaguuauuuagacuuaauucugugucugaaugaauucagugcuuacugccagc

SEQ ID NO: 4195760 - RNA, 70 nt, Human
gcuguagucccagcuaccccggaggcuaaggugggaggaucacuugaaccugggaggcugaggcugcagu

SEQ ID NO: 4195761 - RNA, 67 nt, Human
gcuguaguguugucuaaaugaaugcuaaagucuccaagcuuuagcuuuuaagucauaaccucacagc

SEQ ID NO: 4195762 - RNA, 74 nt, Human
gcuguaguuauuggugaacuuauuauguguguguucauauguuuuaaucaaaaugauuucaugaugauagcagc

SEQ ID NO: 4195763 - RNA, 77 nt, Human
ggacacaccacacauugaauucauucuuguagcugcuacuaggcaacaagauaaggugucaguguguggugguguuc

SEQ ID NO: 4195764 - RNA, 129 nt, Human
ggacacauggggcacuaaaaugccaagcuagcagagaacagcauugcagcuuuggauuugucuaaucucacaguggcuuugcuggucucguguuuuucuugccaguccuuuuaugcccuuggugauucu

SEQ ID NO: 4195765 - RNA, 79 nt, Human
ggacacgcugggaaauggcuucgagcucacacacugauuuucgugaguggaaagagaagcccuuucuuaggcgucuucc

SEQ ID NO: 4195766 - RNA, 70 nt, Human
ggacacuguugagcaauguacaguguauggugugcuuaccuguccacucuagagcauugcuuacagguuu

SEQ ID NO: 4195767 - RNA, 57 nt, Human
ggacacuuuaggccaccaugcaagguuuucagacuuagcauuuccuccaaagugucc

SEQ ID NO: 4195768 - RNA, 71 nt, Human
ggacacuuugggacucagcccuaguguuaucuguguggacccuagaggaacaaaugaguccuaaagaaucu

SEQ ID NO: 4195769 - RNA, 68 nt, Human
ggacagacagggguucuccuggaguaccagaaaguguaguuguacugcaggggaugcucugccugucc

SEQ ID NO: 4195770 - RNA, 75 nt, Human
ggacagacugacggcugggggcaguggucaggccacuguuugucuggcuacuuccaggggccuuaagaacugacc

SEQ ID NO: 4195771 - RNA, 82 nt, Human
ggacagaggaaaaaugcuccaaaucuguggcaaacaggauuucacugaaauuuacaggauucuuuggauaugccuuugauuc

SEQ ID NO: 4195772 - RNA, 90 nt, Human
ggacagagucucaucugucugggcugguuuuggguguggcuccgacuggaggcaagaggauagacuagaauagaugaccgcacacugucc

SEQ ID NO: 4195773 - RNA, 63 nt, Human
ggacagccgaguggccuucucccccccaacaccgguccaggccauugagacucggucuugucc

SEQ ID NO: 4195774 - RNA, 59 nt, Human
ggacagcguggcugguggagggacccugccuggcaccggcuuccaccaucacucuguuu

SEQ ID NO: 4195775 - RNA, 81 nt, Human
ggacagcgugucugggucuggcugcuggugcagcccaucucgauucuggacugagauucaguggucacacccgacgucucc

SEQ ID NO: 4195776 - RNA, 83 nt, Human
ggacaggagaggacacagcugcucugcagaggcacacagcuuguacccaaaaccugcaggagggcaggugguccucagccucc

SEQ ID NO: 4195777 - RNA, 59 nt, Human
ggacaggcgcagggccaaggaagucuuuguuuuuguuucuuucucuagcccuuccugcc

SEQ ID NO: 4195778 - RNA, 107 nt, Human
ggacagggaaagcuccagggcuugcccccuccuucugagcaccagcaagacaggugaccaccagcaggcaggugggccaagucccugucuccauguuggcccuggcc

SEQ ID NO: 4195779 - RNA, 56 nt, Human
ggacagggagucugguccuguguguccuucaccauguuacuuaaccucucugugcc

SEQ ID NO: 4195780 - RNA, 128 nt, Human
ggacagggugccugugucccacagacaggacuccuaugccccauggacagggugccugugucccacggacagggcuccuaugccccauggacagagugccuguguuccauggacagggcacccaugcc

SEQ ID NO: 4195781 - RNA, 55 nt, Human
ggacaggugacugcccagagugaacugacugguuagggcugggccuccccugucc

SEQ ID NO: 4195782 - RNA, 72 nt, Human
ggacagguucuuuugguagagugugcaucuuguucuuuugguagggugugcaucuugguaauggagcuuucc

SEQ ID NO: 4195783 - RNA, 76 nt, Human
ggacaguacagguagaagucacuaacugggacaguacaaucaaaacaauccaagugacuacugauuuuuacuuucu

SEQ ID NO: 4195784 - RNA, 81 nt, Human
ggacagugaagcaugcagggagcagaggagacacaugauaagugucugcuguuccguucucuguuugcauguacuauaucc

SEQ ID NO: 4195785 - RNA, 59 nt, Human
ggacagugggugaaauccuguagcccugggaugcagagcuucuaggagacuggcugucc

SEQ ID NO: 4195786 - RNA, 56 nt, Human
ggacaguuguuuuccagauauguuuaaaauguaggcauucuaaucaaggacugucu

SEQ ID NO: 4195787 - RNA, 119 nt, Human
ggacaguuuagacuuugccugguaggaagguggugggagagacaguggccccucaugaucccuuugggcugcaguuucuuggaugccaauuucucaugucuggccugguuccacugucc

SEQ ID NO: 4195788 - RNA, 64 nt, Human
ggacaguuucuugagaaggcuaacagcugaggacagcucuucuagcaucuggagaaacaagucc

SEQ ID NO: 4195789 - RNA, 112 nt, Human
ggacauagccgaagcucgccuuagcgaagagagucucaccuccucgggcuuugcacagaguuggagaagaggucgggaaucacagggaggcuggauuuuggcugcucugucc

SEQ ID NO: 4195790 - RNA, 59 nt, Human
ggacauaggacuuagaacuggaagacaugauuugccuuccugcuuugaguucugacccc

SEQ ID NO: 4195791 - RNA, 73 nt, Human
ggacauauaggugcuuccugucuuuugcuguuguaaaagcaauguggcaaugguuagcacuguacauaugucc

SEQ ID NO: 4195792 - RNA, 80 nt, Human
ggacauccugcucuuggguuuucuggaagccugggauuaagaagaccagaagggcuuccaguccucagaggcuggauucc

SEQ ID NO: 4195793 - RNA, 109 nt, Human
ggacaucucaccagcauagugggaggcacagcucuggaauaaugaugugaugaaauuacaacagucauuuucccugggucccucucauaagcaaagcuguugaaaugcu

SEQ ID NO: 4195794 - RNA, 57 nt, Human
ggacaucucuugccagggcugcaauccuuuauuaggcuaauuauggaaagagagucc

SEQ ID NO: 4195795 - RNA, 60 nt, Human
ggacaucugggccccaggucuaggggacuuguuccuguuuccuccuguggcccagaguuu

SEQ ID NO: 4195796 - RNA, 55 nt, Human
ggacaugcaauauugagacuuucucucuugaggaagcaguuuauaaugcauuucc

SEQ ID NO: 4195797 - RNA, 74 nt, Human
ggacauguuuucaccaugugggcaguggaggcggugaacaccacugacaguuguauuacaugggaauugugucc

SEQ ID NO: 4195798 - RNA, 62 nt, Human
ggacauuauuuucccucagaucuuauaguccugucuuauggaacuauggaggaaauaagucc

SEQ ID NO: 4195799 - RNA, 86 nt, Human
ggacauuccagcuauggucauaacaugauuaguaggugguaauucauaacuugguacagcuaugaagaaauaguauggaagagucu

SEQ ID NO: 4195800 - RNA, 129 nt, Human
ggacauugccagugacccaggccccguccuuaccuucaaggcuguugcgagguagugagggaggcuggcagcguaguaggagcauugaggguauggaggugaggccagggggagccaucaggcaggccc

SEQ ID NO: 4195801 - RNA, 66 nt, Human
ggaccaagcgucuaauuggggguugcccaggucucacuggugccuggcuucccuuggagcauuucc

SEQ ID NO: 4195802 - RNA, 67 nt, Human
gcuuuugucauuucccugauuaaagccuuucuauggcuccauguuaggcaaugaugcaauucaaagc

SEQ ID NO: 4195803 - RNA, 59 nt, Human
gcuuuuguuucuguuuauuuuugugugaggagugugcacauguagaugaaagcaaaggc

SEQ ID NO: 4195804 - RNA, 70 nt, Human
gcuuuuuagaggaggaaacugaggcucuguguauuugagagacaaccucagggucauccuaguaauaggu

SEQ ID NO: 4195805 - RNA, 73 nt, Human
gcuuuuuagcaauaugaaugcauuugcacauuaccuccauaacaugcaaauacuucuguauaugcuggacugc

SEQ ID NO: 4195806 - RNA, 74 nt, Human
gcuuuuuccuuggagagggagaaaaauaacauucugguuucagaugcuguucuuucccuuuuuaaaucuauggc

SEQ ID NO: 4195807 - RNA, 66 nt, Human
gcuuuuugagaguauucacuuagucauccaacuggugacaaagucaacaguacucucagaaccagc

SEQ ID NO: 4195808 - RNA, 69 nt, Human
gcuuuuugguuuuauugagaucgaagugauggacacagaagccagauuguagugggacugggacuuagc

SEQ ID NO: 4195809 - RNA, 79 nt, Human
gcuuuuuuauuauugacagaugcauuauguuguaagcccauaaguggcuacaucuauuucuccucugucagaaagaagu

SEQ ID NO: 4195810 - RNA, 79 nt, Human
gcuuuuuucuaguuacaggaguuucugaaauugacaaacauguaaggaagucaauaaagaaaaagucugugagaugagc

SEQ ID NO: 4195811 - RNA, 71 nt, Human
gcuuuuuucuuguuuagauucuuugucuugugcuuccuguaucuuauauggcuucugaggaauggaagagc

SEQ ID NO: 4195812 - RNA, 79 nt, Human
ggaaaaagaaguuguauggggaggcugucgagugacaacacggauuuuuauuaaccuccugguccagcaucucuuuucc

SEQ ID NO: 4195813 - RNA, 92 nt, Human
ggaaaaauagccaugauuuucucauuuucaugugguauucuauuuuuuccuucauuugagauguaauagaaaauugcuauucugaaauuucc

SEQ ID NO: 4195814 - RNA, 73 nt, Human
ggaaaaccuguaguuuucuuaccacuaugaaaugaagccauuggauagacauaagaaaaauuuuaggucuucc

SEQ ID NO: 4195815 - RNA, 79 nt, Human
ggaaaacuaugagcuuuggaaugagaaacaccugcacaauccugggcaaguuucuugaccuuucugagcucucauuucc

SEQ ID NO: 4195816 - RNA, 82 nt, Human
ggaaaacuuaugugcuuuagaucugacuuucugugcaaaaaugugagauuugcuacaggugggacccaggucugaguuuucu

SEQ ID NO: 4195817 - RNA, 56 nt, Human
ggaaaagaaagggacugauuggaaaggauaguucugucuccacacccuuuccuucc

SEQ ID NO: 4195818 - RNA, 67 nt, Human
ggaaaagaguagcugucuccuagaaacugaaggaacccuuuacaacuguagcagugugcucuuuuuc

SEQ ID NO: 4195819 - RNA, 56 nt, Human
ggaaaagcacauucaauuuuguaugagaucucucaaacauuugaagucgcauuucu

SEQ ID NO: 4195820 - RNA, 70 nt, Human
ggaaaagcaucucuauguggagaguggagagcaguggcgcauuuuauuugacaugguggauuugcuuucc

SEQ ID NO: 4195821 - RNA, 93 nt, Human
ggaaaagcuucauguugguagcugauauuagcaaugagugccuccgaaaugugaauuuggaacugcauaaugauucugcugccucuuuuuucc

SEQ ID NO: 4195822 - RNA, 60 nt, Human
ggaaaaggaugcagggacccaaggcuuuuuaaguguaacuagucugccugcuccuucucc

SEQ ID NO: 4195823 - RNA, 57 nt, Human
ggaaaagggguggacugugauggcugacuucagccuuccacccagauccccuugacc

SEQ ID NO: 4195824 - RNA, 94 nt, Human
ggaaaaguccaagucuaggcccaagaaucacuggauguugcuccuguaagagugcuuucagaaauacacuagucucuucuugacuugggcuucc

SEQ ID NO: 4195825 - RNA, 75 nt, Human
ggaaaaguguuaagguguugauaauuccaagaaagcuuuuauuuguccuacaaucauuacuuugauaccuuuucu

SEQ ID NO: 4195826 - RNA, 121 nt, Human
ggaaaauaaaauauugccagucucuuuagucauuguaugaaguguacucauuaaaggguuaccucuuaagcugagcccagagaacagucaguacaaugaaagguauggcaaccaauuuucc

SEQ ID NO: 4195827 - RNA, 55 nt, Human
ggaaaauacugauucaugccauaauaaucacauggaagagucaggccaauuuucc

SEQ ID NO: 4195828 - RNA, 56 nt, Human
ggaaaaugaacuggagaacaaugacccauuucugggucuguucacuguucaguucc

SEQ ID NO: 4195829 - RNA, 59 nt, Human
ggaaacagucugggaguuccuuauaagguuaaacaguuaccuuauaacccagaaauucc

SEQ ID NO: 4195830 - RNA, 66 nt, Human
ggaaacauugaagcugugaaaucaaacaauuuacacgagugagaaguucagcauuuggauguuucc

SEQ ID NO: 4195831 - RNA, 71 nt, Human
ggaaacauuuuuacugggcaucugcaucaaaauucaugugcagcuagcgugccuagugaagcauuguauuc

SEQ ID NO: 4195832 - RNA, 58 nt, Human
ggaaaccaaacauuugcgguggugcgggggguuccguggcugcagguggguuuggucc

SEQ ID NO: 4195833 - RNA, 99 nt, Human
ggaaaccagagcccggaauguuaguuugaacuugucuauguuacauaccagguaaacaugggugcuucaaacuaaauaugauuccacagcccucauucc

SEQ ID NO: 4195834 - RNA, 71 nt, Human
ggaaaccagucagucucuauuccagccaccucugucagaacagggcuggggaaagaggcuaacugguaucc

SEQ ID NO: 4195835 - RNA, 70 nt, Human
ggaaacccaguacuguuuuccauaguggcugcaccauuuggcauucccaccaacaauguacaggguuucc

SEQ ID NO: 4195836 - RNA, 78 nt, Human
ggaaaccggcuggagaggauuuagaaggacuacagugugaugguaucuugcuuccuuuuaauuaccagcugagugacc

SEQ ID NO: 4195837 - RNA, 88 nt, Human
ggaaacgcaggcgcagaaggccaggggccuggagggcuaacuccagccucagccccccauagugccccaggccuucuggcuucauucc

SEQ ID NO: 4195838 - RNA, 122 nt, Human
ggaaacucauugagucaugcaaauguaaaggaacagagaagcuuuacuaaaguucaguacaaguguucuguguuuuucacuaggcauccuguauuuuuauuugcuagaccuggcgaucuucc

SEQ ID NO: 4195839 - RNA, 58 nt, Human
ggaaacugagauucaaagagguucagugucauaucuggccaagauaaucucaguuuuc

SEQ ID NO: 4195840 - RNA, 68 nt, Human
ggaaacuuggcauaauuuuaaguagaugggcuggacauuauauuauguguauugugcuaaugguuucc

SEQ ID NO: 4195841 - RNA, 80 nt, Human
ggaaagaaauaggccugcuuaagguucaucuccacgugugcuuguaaaugaacucaccuuggcaguuucuaccuuuuucc

SEQ ID NO: 4195842 - RNA, 88 nt, Human
ggaaagcaagcaucaccuucugcaaucaugacaagaggcuuuuauucucagcaggcacuugaucauuguuacagaugcuuucuuuacc

SEQ ID NO: 4195843 - RNA, 78 nt, Human
ggaaagcggcaggugauucagcaauuuuuguagcacgacagguugugcacaaaguguuuucugaaggccugcacuucu

SEQ ID NO: 4195844 - RNA, 77 nt, Human
gcuucucugucauuggggaugugugaaccaguccacugagaggcccagcacacggaaucccuuuugugacacagggc

SEQ ID NO: 4195845 - RNA, 58 nt, Human
gcuucugaaucccacccaacugcugcuguccagggacagccaggaugggagcagaagc

SEQ ID NO: 4195846 - RNA, 90 nt, Human
gcuucugaguuucugugaauucugcaguaauggccccccacucaaccuugcuuacuguuucaagcccucacagacaaugagcauuagagc

SEQ ID NO: 4195847 - RNA, 121 nt, Human
gcuucugaugcacugucauuuggaaaccacugcccuaggucaaaccaugccaugauaguucccacaucacgucaugguuugaucuggacuuuaggaaagugacugguggcaggcuugaagc

SEQ ID NO: 4195848 - RNA, 57 nt, Human
gcuucugcagagccguccugaggcucugacaucuaugagucggcggccagcagaggc

SEQ ID NO: 4195849 - RNA, 63 nt, Human
gcuucugcuggcugugcaaaggcauggggaaaugcucugugugugaacacagcccagcagugc

SEQ ID NO: 4195850 - RNA, 67 nt, Human
gcuucugggguucuggcaugcucauuacuucccuucugaccaucuucccuauggaccccaggccugc

SEQ ID NO: 4195851 - RNA, 65 nt, Human
gcuucuugccuguguagagaaucucauggaaaaccuggguacuaacguucuuucauaguaagagc

SEQ ID NO: 4195852 - RNA, 55 nt, Human
gcuucuuguagcccccuugaccucaccaguaaggcagcuaagggggaaacggagc

SEQ ID NO: 4195853 - RNA, 72 nt, Human
gcuucuuuauugacucccagcuuuuccaacucugguugugaaccuuggugagucaguauucauuagaggagc

SEQ ID NO: 4195854 - RNA, 65 nt, Human
gcuugaaaauguuuuuuggucugaugaaugcaaucaucaucaucaacaagaaacauuuguugagu

SEQ ID NO: 4195855 - RNA, 80 nt, Human
gcuugaaacugagaucaaggugucauuucucugcaggugcuaauauugcccaugauggggaaagauaccaucuaccaagc

SEQ ID NO: 4195856 - RNA, 89 nt, Human
gcuugaaagagcuccugcugcauccugccugguccagagcaacaggaauaaccacccaggucagugagugcacaggagcuaaaucaagc

SEQ ID NO: 4195857 - RNA, 87 nt, Human
gcuugaacauauccuuguacuauaguauuuauaaguuuuguuauuauuguuauggguacuaguauuagugauacugaauguguaggc

SEQ ID NO: 4195858 - RNA, 64 nt, Human
gcuugaacccaggagguugcagugagcuaagauugagccacugcacuccagugugggugauagc

SEQ ID NO: 4195859 - RNA, 70 nt, Human
gcuugaacccaggguggagguugcagugagccgagaccgugccauugcccuccagccugggugacaaagc

SEQ ID NO: 4195860 - RNA, 80 nt, Human
gcuugaagagagcuaagggccuuguccacugcaagccagcaaggaauggagccaggacaaagcucugcugccucccaggc

SEQ ID NO: 4195861 - RNA, 81 nt, Human
gcuugaagcuagaaacacagaucuggugucaucagcugacauugcucuagaucguuucgaaguucuuuuuuaauucaaagu

SEQ ID NO: 4195862 - RNA, 72 nt, Human
gcuugaauccaggacuucgaggcuacagugggcugagauugcaccacugcacucuagcuugggugacagagc

SEQ ID NO: 4195863 - RNA, 104 nt, Human
gcuugaauuuagcacaugugcaugacaguucuacacuuaaucuguaauucagcagaaucaggaccuguggcugucuuacauuugggcuaauuuuucuuaugagc

SEQ ID NO: 4195864 - RNA, 68 nt, Human
gcuugacagugucccucugggguggaaaugaguuccuuagcuccaucaccacagaggacagaguaagc

SEQ ID NO: 4195865 - RNA, 79 nt, Human
gcuugaccagacaucaauuucaaaggcaugacaaagaccccaacaagcaucuuccaggaagcugaugucuagucaucgc

SEQ ID NO: 4195866 - RNA, 72 nt, Human
gcuugaccucugaccuggccccucaaagcugggcaacugaggacauuccagccaccaggucugaggccaggc

SEQ ID NO: 4195867 - RNA, 69 nt, Human
gcuugagcccagguugaggcugcagugagcuaugaucacaucacugcacuccagccugggucacagagu

SEQ ID NO: 4195868 - RNA, 81 nt, Human
gcuugaggagcaguagaguacauggcuccgcaaugucuucaaagaccugggcuuucguuucucuacucugccauccucugc

SEQ ID NO: 4195869 - RNA, 97 nt, Human
gcuugagugaaucagggcugaagaucagaaguccccagucaaggagcuuuccccacuaaugagcucuccgagggccucugacagccccucccuuugc

SEQ ID NO: 4195870 - RNA, 58 nt, Human
gcuugaucucugcccucauguagcugacacacugaggcaacugagaccacagacaagu

SEQ ID NO: 4195871 - RNA, 83 nt, Human
gcuugauguuguaaaaaguacacuacguggaguuagaaacccucagugucuaaccuuguggucugcuggugcuguucuuaggc

SEQ ID NO: 4195872 - RNA, 60 nt, Human
gcuugcacaggaucugaagugggcuuggagcauccaagaaucccaaggcccugggcaggc

SEQ ID NO: 4195873 - RNA, 64 nt, Human
gcuugcaggagguugagccaggacugacgcuccaagucugucugaauccuaagcuuccucaagc

SEQ ID NO: 4195874 - RNA, 96 nt, Human
gcuugcaugaucgccccauuaggcagacaacguagccggagaucacaaaucaggcccuuggcuguaguugcuaguguguggaggugcagagcaggu

SEQ ID NO: 4195875 - RNA, 56 nt, Human
gcuugcugcucuggagucaugcccuuccagcaauagggcaggacccgguagggagc

SEQ ID NO: 4195876 - RNA, 65 nt, Human
gcuugcugggcucaaccuccagagcuucugauuuaccaggcuuggggugagggccaagaauuugc

SEQ ID NO: 4195877 - RNA, 68 nt, Human
gcuuuugucauggugacucagucacaugaaauuacugaccuacauugaugacuguuaucugauaaggc

SEQ ID NO: 4195878 - RNA, 83 nt, Human
gcuuuuucaccccaauagcucacagaauaugaugauuguuauauagaucaaaugaugcuaauuggaucuggugaccaaaaagu

SEQ ID NO: 4195879 - RNA, 66 nt, Human
gcuuuuuugaugcaaaaacucuaggaauaguagcccuaugucucagaguguuguauuagagaaugu

SEQ ID NO: 4195880 - RNA, 91 nt, Human
gcuuuuuuugugugagcuucaguauuagaaguuuuagcuggauuuaaugcuaaauugcuuauaaagaugaaugaagcugcacagggaaagu

SEQ ID NO: 4195881 - RNA, 100 nt, Human
ggaaaaagggggaaaggcuaauauauguucaugucaaacaaaugccuucaagggcguaguugugcagcgaggauaguccuuuacuuuugccucauauucu

SEQ ID NO: 4195882 - RNA, 64 nt, Human
ggaaaaaguggcaagucaaugauagugacccagcaugguuacauuuggcuauguccucuauucc

SEQ ID NO: 4195883 - RNA, 74 nt, Human
ggaaaacauaauuuagcucuaccagugcauuugugcauacaaauguguauaagggagagcuaaauaacuuuuuc

SEQ ID NO: 4195884 - RNA, 68 nt, Human
ggaaaacuguguuuuuggucugaucuaucagaucaucauugaagaucaagaucagagaacagcucucu

SEQ ID NO: 4195885 - RNA, 101 nt, Human
ggaaaacuugauagagagaugaaaauaucaaaguaggcauauguuuuuaugaaaguuucagaaaaguauguuuauuuugacuuaugucuaaauuagauucc

SEQ ID NO: 4195886 - RNA, 56 nt, Human
ggaaaagcuuuguuuggccauagggcucuacucucccuagcuuagcauacuuuucc

SEQ ID NO: 4195887 - RNA, 57 nt, Human
ggaaaaggaaagcaguauaagguuuucccuacuucuucucugcuuugccuucauucc

SEQ ID NO: 4195888 - RNA, 108 nt, Human
ggaaaaggaacgauggacauagcuucauacugucagagccugaaggggucuuggaaaagcucuaggucaggaauggcuugcaggcugucacuuuccauucccuuaucc

SEQ ID NO: 4195889 - RNA, 58 nt, Human
ggaaaaggaggaauguagccagcuccccacucaggacgcuuccucauuucucuucacc

SEQ ID NO: 4195890 - RNA, 65 nt, Human
ggaaaaggcuuaaagaauuaacagagaugucagaccugacauaguuaagucauugagccaacucc

SEQ ID NO: 4195891 - RNA, 77 nt, Human
ggaaaagggggacaggagcaaaugaugggggcaggcgguaaaugacccaaauuucagugucuucuucucccucaucc

SEQ ID NO: 4195892 - RNA, 103 nt, Human
ggaaaagugcaguauuagggugggagugucccgauuuuccagguaccaucuguuauggcuucccuuugccaggaaagggaauucccugaccccuugugcuucc

SEQ ID NO: 4195893 - RNA, 106 nt, Human
ggaaaauacuuuucagaaauauguuacguauuccugagcaguaaaaugggcaacuucacacaugcugauaagaauauaaaauggcacauuucugaagggcaguucc

SEQ ID NO: 4195894 - RNA, 78 nt, Human
ggaaaaugacaaaucuacauaaaacgaauacauaguccugaaagggucuaugaauugcauuuauaguuguccuuuucc

SEQ ID NO: 4195895 - RNA, 80 nt, Human
ggaaaaugaguuugccucuagauagcaaggcuuguuuuauagacaaucugauuuuccuagucagaggcaaggcauuuuuc

SEQ ID NO: 4195896 - RNA, 101 nt, Human
ggaaaauggaaaagucuggcauuggagcaguccgcagaacaaggaaaaaacagcuuugcuuugcuuggcccauugcuucaguaucuuauaguugguuuucu

SEQ ID NO: 4195897 - RNA, 64 nt, Human
gcucugccaucuucucuggggauguuggcuuguucuuaacuccucaaauauggggugguagagu

SEQ ID NO: 4195898 - RNA, 68 nt, Human
gcucugcgcugcacucaucugcagucggcugugaguuggcuaggcagcucugcugguggugccagggc

SEQ ID NO: 4195899 - RNA, 71 nt, Human
gcucugcucucuuuacccucugagacaagaaaccccacauagacuucucagaggugguaaaggacagcagc

SEQ ID NO: 4195900 - RNA, 65 nt, Human
gcucugcugacagcugggacagggugggcacuuggcuucccagaagucugagcuguugcagcagc

SEQ ID NO: 4195901 - RNA, 59 nt, Human
gcucugcuguaaugagucagcaucuagaaagucagagcacugcugauuuacaguccagc

SEQ ID NO: 4195902 - RNA, 63 nt, Human
gcucuggaaaggauugaagccucgcacugaaucccagugaccuccaauaccuuucuucccagc

SEQ ID NO: 4195903 - RNA, 102 nt, Human
gcucuggaccugggggucugcuguagguaggacagcaccuccuucccuuauccuuggucugugggugcugcccucccugcccagcuacucacauacagaagc

SEQ ID NO: 4195904 - RNA, 130 nt, Human
gcucuggagcauccgccacaucuuaggcuggacagccaaucacaugccaagggaggcugggcucccccuuccaggggcucucagggugugugcuguggaugugugcccaagaagguguguguguucaugc

SEQ ID NO: 4195905 - RNA, 82 nt, Human
gcucugggaacuggggagucaagcaucaaggcaccagccaguucugugucugaugauagugucucuccugguucauagaugc

SEQ ID NO: 4195906 - RNA, 59 nt, Human
gcucugggcugaaucauuuaucugauuauguggacuaaaagaauguagagguccagggc

SEQ ID NO: 4195907 - RNA, 62 nt, Human
gcucuguacguagcacugagagaugcagguaauuguuggaguugcccacggugcuguagggc

SEQ ID NO: 4195908 - RNA, 72 nt, Human
gcucugucacccaggcuggagugcaguggcacgaucucggcucacugcaaccucugccucccggguucaagc

SEQ ID NO: 4195909 - RNA, 64 nt, Human
gcucugucaguugaggacucaccuuugaagccacucuggugcuucugucuucccacugaggagc

SEQ ID NO: 4195910 - RNA, 82 nt, Human
gcucugucgcuaggccggagugcaguggugcgaucucgguucacugcaaccucugccucccagguucaagcgauucuccugc

SEQ ID NO: 4195911 - RNA, 105 nt, Human
gcucugucucuccuuggcucggugaccagccagugcugucugucaagggcuggccucugcggggcagaugcuccuggcucuucccgacaggugagaaauggaagc

SEQ ID NO: 4195912 - RNA, 60 nt, Human
gcucugugcucccaugcuaguaacuuaaccucucugaguguguacuaguuaaguacaggc

SEQ ID NO: 4195913 - RNA, 59 nt, Human
gcucuguggcuacacaaaccuccaaagccucacccauggagguagucugagucauaggc

SEQ ID NO: 4195914 - RNA, 67 nt, Human
gcucugugugccagagggcuccauggcagagcaggugugcaugcucaggccucggacacacaauagu

SEQ ID NO: 4195915 - RNA, 68 nt, Human
gcucuguuaagucuggaaugaaaguuaucuuuaacagccagacuuucagacucagaacuuagcaaagc

SEQ ID NO: 4195916 - RNA, 68 nt, Human
gcucuguucuaagcauucuauguggauuaacucauugaauccucguaggaacucuuuuagaaauaugc

SEQ ID NO: 4195917 - RNA, 94 nt, Human
gcucuguucuggucacuaugcugggcaacggaagagagaaauuaauaagacuuaauuccugccuuugaauugcucacagugagaugggacaggc

SEQ ID NO: 4195918 - RNA, 55 nt, Human
gcucuguuuaucccugacaauuaucuauagcagaaugaagggggauggacagggc

SEQ ID NO: 4195919 - RNA, 76 nt, Human
gcucuuacucagggagucuuuugucacuggguagugugguaguugagugauucccagacuuccugggaaacagagc

SEQ ID NO: 4195920 - RNA, 103 nt, Human
gcucuucauggcagcugggagcagugggccaggagucacccgggcaugaccaugugguguggccaggucagggacuuguggcuccugccccucccuuuggagc

SEQ ID NO: 4195921 - RNA, 65 nt, Human
gcucuuccucuuuagucuguguggagaagcuaugaaucauucauggucucccagcugagaagggc

SEQ ID NO: 4195922 - RNA, 116 nt, Human
gcucuucucuucuugucauauuuuuaauauugcaugcuuuuuuccagccuguauaccagugcuauuuaaaggaaaagaauugcagugaaguaauaguuugacggcuccugaacugc

SEQ ID NO: 4195923 - RNA, 69 nt, Human
gcucuucugccuggcucauggcagugaggagacccacgcucaccuucgcugccugggucaaguagcugc

SEQ ID NO: 4195924 - RNA, 80 nt, Human
gcucuucuucaaaauuaaaguaugguuuaagggcuucaaauaaacugaagauuuucucaacuguauuuguaaaagagagc

SEQ ID NO: 4195925 - RNA, 69 nt, Human
gcucuugaggaagugcagggcagugagauuccagagcagcugccaccccucugcacccucaggucaggc

SEQ ID NO: 4195926 - RNA, 70 nt, Human
gcucuugccucauggcggcugccccaggccaaguuucugccugccugccagcagccucaacaggcacagc

SEQ ID NO: 4195927 - RNA, 96 nt, Human
gcucuugcuguucccuccaccuggaguguucuucccccaaagcaguacacaguuguuuacugcaugaaggcaccuauuugggggguuagugggggc

SEQ ID NO: 4195928 - RNA, 59 nt, Human
gcucuuuagggaucucuggggaaauggagugccuuccucaacaacuucccuacagaagc

SEQ ID NO: 4195929 - RNA, 62 nt, Human
gcucuuuuccuucccuacagaucucagccagauuggugauggaaauggaaggauaaagaugu

SEQ ID NO: 4195930 - RNA, 67 nt, Human
gcugaaaacugaggaacaaggaaggauucugagaggucaucuaauaucuuuccuguuuucagacagc

SEQ ID NO: 4195931 - RNA, 76 nt, Human
gcugaaacucuucauucaaguaugcaaaugauacucaauuuguaagauucacuuggaagaaauaaagagguauagc

SEQ ID NO: 4195932 - RNA, 63 nt, Human
gcugaaaggggugacauucuuuucucagaagcaagacugucuaaaggaagcucccccuacagu

SEQ ID NO: 4195933 - RNA, 84 nt, Human
gcugaaauaaauugucaaauauaugcaaaacuauucaauauaaaaagaaaguaaaauguaauguuugaaauuguuuguuccagc

SEQ ID NO: 4195934 - RNA, 69 nt, Human
gcugaaauaccaguggccauaaaggaaggcaguggaaacaggcuuugcuuuacucccacuguguucugc

SEQ ID NO: 4195935 - RNA, 72 nt, Human
gcugaaauagaaacagaauaugagugagaggcugucccuaaacaccuauaguuaacucuguucuaggucagu

SEQ ID NO: 4195936 - RNA, 65 nt, Human
gcugaaauagcauguuaauaaccagaguagcuaucagcaccuccuuggucaauugacaugucagu

SEQ ID NO: 4195937 - RNA, 55 nt, Human
gcugaaaugaaaacacaggucgguagauuccaacucuaagaccuuucacuucagc

SEQ ID NO: 4195938 - RNA, 56 nt, Human
gcugaaaugggcacugaaggccucuccaaguggaggggccuuggccucuuugcagc

SEQ ID NO: 4195939 - RNA, 62 nt, Human
gcugaacaguaucuuuuaucagaaauacugaacaguauuucugauacaguguacugaauagu

SEQ ID NO: 4195940 - RNA, 62 nt, Human
gcugaacucuggaagggugaggcugugucuagcuugcuacagcuguauccccagagcucagu

SEQ ID NO: 4195941 - RNA, 66 nt, Human
gcugaacuuaugugggacugcaauggcagugaaccagugugagcagagccugacaugaggagcagc

SEQ ID NO: 4195942 - RNA, 100 nt, Human
gcugaacuuuacacagcuuuuacauuucccucugucaguuccucuuguaaugguggguggguagcugaagggaggauauguacaauaauguauuuuuagu

SEQ ID NO: 4195943 - RNA, 87 nt, Human
gcugaagaaaauucacaugugcuucuuaucacugaaauuuaauauuguuugggguugauuauuugcauuugucaauuuucauucugc

SEQ ID NO: 4195944 - RNA, 115 nt, Human
gcugaagaaagcacauaguugggggucuuagauagguuuggaagccauauggacuucuuuuaaugagggagggcuuuugcaauccaagucucaaagcuguguuguucuaaucagc

SEQ ID NO: 4195945 - RNA, 68 nt, Human
gcugaaggcaauugagaagaaacagacacauaaaaagcucucugcccuccccuuauuugccuaaaagc

SEQ ID NO: 4195946 - RNA, 88 nt, Human
gcugaagucaagagacuggcuuuggagccuguguucugccucuucugagagagcacagugagcuugagaaagauagucuaccuucagc

SEQ ID NO: 4195947 - RNA, 73 nt, Human
gcugaagucacuucuuaggaaaggagucaauaaaguuugaauuguucccagucaaacgaaggacuuccuuagu

SEQ ID NO: 4195948 - RNA, 99 nt, Human
gcugaagugguugaacaugaaaagacuugggugaaguaauuuuauagagaggaaaaguuucuuugcugccaaguuuguuuaucuugucauacuauuagu

SEQ ID NO: 4195949 - RNA, 78 nt, Human
gcugaauaaaugcuuauauauguguguguguguguguguguguguguguguguguguguguaaaagcauuuauauagc

SEQ ID NO: 4195950 - RNA, 65 nt, Human
ggaggugagcagcccuuccuccggccacucaaguaguggggacugggaggaggggcgcuuugucu

SEQ ID NO: 4195951 - RNA, 63 nt, Human
ggaggugaucagaguuuugaggagcaaaaggccuaaacauccucuugcucuguugucacuuuc

SEQ ID NO: 4195952 - RNA, 55 nt, Human
ggaggugccuguaaaaaugagcauguuuuauucuagguucauuucuaggcacucc

SEQ ID NO: 4195953 - RNA, 75 nt, Human
ggagguggcaucuaaacuugcaucauugucuuuauuccuuuaaugcauaguugaugagguuggguauccauuccc

SEQ ID NO: 4195954 - RNA, 118 nt, Human
ggagguggcgcagcgcaucacggcggagcugaagcgcuacagcaucccgcaggcaaucuucgcgcagcggauccugugucgcucucagggcacgcucuccgaccugcugcgcaacccc

SEQ ID NO: 4195955 - RNA, 55 nt, Human
ggaggugggaguuuaguucuugaccugugcugcucaaugcuggcuucccaccucc

SEQ ID NO: 4195956 - RNA, 93 nt, Human
ggaggugucuugcuuuuuggggggcccugaaguagggaggguacuguuucuuuucugaaagauguucagggcccugagagggcagucacguuc

SEQ ID NO: 4195957 - RNA, 81 nt, Human
ggagguguggggaggagagagcccuuucugauuaauaacuagcaggguaauguugagggcuuuuucugcccgauugccuuu

SEQ ID NO: 4195958 - RNA, 63 nt, Human
ggagguucugauuugucacaacuuaauuauacauucuugugacuacagagauccagaauuucc

SEQ ID NO: 4195959 - RNA, 89 nt, Human
ggagguugggcguuuugucuuucucuggaacaguaaaacguuagaaaaccauuuuccuuuuacagagaaagaacaagacucuuaccucu

SEQ ID NO: 4195960 - RNA, 97 nt, Human
ggaguaaauauagauagcaaagaaccugauaccccaagaaaccaguuucuaccaugaucugggggauuuucucauauguuacuauuuaauuugcuuu

SEQ ID NO: 4195961 - RNA, 66 nt, Human
ggaguaagacccacaagauuuaauaggcuggaaaagaccugggaggcugugggucugcugagcucc

SEQ ID NO: 4195962 - RNA, 86 nt, Human
ggaguaagaguaaguugguggucggcauaaugaauggcugugaugucaaggccaggaucuguuuguccaccaaucuuuccuacucc

SEQ ID NO: 4195963 - RNA, 81 nt, Human
ggaguagcuggcuggaggaaucacagaaggcuuccuggaggaaguggcuuugagcuucugccaucuccaugcagcuacucc

SEQ ID NO: 4195964 - RNA, 77 nt, Human
ggaguaggaugugauacuccuucuaguggaaauaccagucaaauguccgugggucuugaagugucacugcauacucc

SEQ ID NO: 4195965 - RNA, 74 nt, Human
ggaguauaaggaaagaguccuucuuuguuuucuucuuugguggccaaagaagagcuggaaggagucuccuuucc

SEQ ID NO: 4195966 - RNA, 82 nt, Human
ggaguaucacaguaaauuggcaauggagacuaagugugaauucagacacccagagcgccagugccgagcuuuuaccugcucu

SEQ ID NO: 4195967 - RNA, 61 nt, Human
ggaguaucuggcacauccagcugugcucuagccuggagcuggcuggcauagccauugcucc

SEQ ID NO: 4195968 - RNA, 76 nt, Human
ggaguauucuccaggugcuaagugugccuuuugcuccuuuugcaaauagacuugcaggcugcccugggggagcugc

SEQ ID NO: 4195969 - RNA, 59 nt, Human
ggagucaaggaaggcucugugaugggcucuagcagccaugagccccugccuuguacucu

SEQ ID NO: 4195970 - RNA, 70 nt, Human
ggagucagaaguucuagauuugaguccuaaauuuaucguuuuaggucaacuuggaugacuuuucagcucc

SEQ ID NO: 4195971 - RNA, 58 nt, Human
ggagucagccugucagaguguaggcuuuaugcuugugucugugccugggcuggcugcc

SEQ ID NO: 4195972 - RNA, 59 nt, Human
ggagucagggaggaaggggugcuuggaggcagcccaagacaaacuuccuucacugcacc

SEQ ID NO: 4195973 - RNA, 88 nt, Human
ggagucccaugagguagaagagccaggacagauccagcuucacacucagacuugggcuguuuccuccugaugcucuacagccuccucc

SEQ ID NO: 4195974 - RNA, 101 nt, Human
ggagucuaacucccugcagcuaacaacacauaaauaugaaugauaagaguuauuagcaauacaucuugucagauucauguguugcaguuagguugggcucc

SEQ ID NO: 4195975 - RNA, 64 nt, Human
ggagucuauaucucaugagugcucccaccaauggugcucagcagaaaugaugguaugggacuuc

SEQ ID NO: 4195976 - RNA, 101 nt, Human
ggagucucacccacaggaacgcgcaccagcugcuggguucuagagaguuccagaagcacugacgaucuucccggcaugcggugugagcccggugaugcccc

SEQ ID NO: 4195977 - RNA, 88 nt, Human
ggagucucacucuguggcccagguuggagugcagugguguaaucucagcccacugcaacuucugccuccuggguucaagugauuaucc

SEQ ID NO: 4195978 - RNA, 86 nt, Human
ggagucucacugucucccaggcuggagugcaguggcacgaucucggcucacugcaaccuccgccuaccggauucaagugacucucc

SEQ ID NO: 4195979 - RNA, 88 nt, Human
ggagucucacuuugucacccaggcuggagugcaguggugugauaucggcucacugcaaccuccaccucccggguucaagugauucucc

SEQ ID NO: 4195980 - RNA, 62 nt, Human
ggagucuccaugugccccucagcuugugcccacagaugugaggacucauguggaggauggcc

SEQ ID NO: 4195981 - RNA, 88 nt, Human
ggagucucgcucuguagcccaggcuggagugcaguggcaccaucuugguucacugcaaccuccgccucccagguucaagcgauucucc

SEQ ID NO: 4195982 - RNA, 87 nt, Human
ggagucucgcucugucaccaggcuggagugcaguggcacaauuuuggcucacugcaaccucugccucccggguucaagcgauucucu

SEQ ID NO: 4195983 - RNA, 87 nt, Human
ggagucucgcucuguugccaggcuggagugcaguggugugaucucggcucacugcaagcuccgccucccggauucaagugauucucc

SEQ ID NO: 4195984 - RNA, 88 nt, Human
ggagucucgcucuguugcccaggguggagugcaguggcgcgaucucggcucacugcaagcuccgccuaccgggcucacgccauucucc

SEQ ID NO: 4195985 - RNA, 62 nt, Human
ggaaugcacugguucuuucccauaguuugcauuuaaacugugugaaacaucaaugugugccc

SEQ ID NO: 4195986 - RNA, 55 nt, Human
ggaaugcucaguucuuggugcuggagugugaggcagcgcccuccuggucuauucc

SEQ ID NO: 4195987 - RNA, 100 nt, Human
ggaaugcuuuaucaaacuuuaaggaucccgauuuucuagaaaacaaaagcaucuaugaggugcuagagaauugucuugagaguucauaggucaccauucc

SEQ ID NO: 4195988 - RNA, 81 nt, Human
ggaauggcugguccagaugccuuggcuuuauuaacucacuacacucacugguggagccuccucacacuguggccagacucc

SEQ ID NO: 4195989 - RNA, 62 nt, Human
ggaaugggagcuuggcagugucacuagggagccacacuuccucugccugugagcuuccaucc

SEQ ID NO: 4195990 - RNA, 57 nt, Human
ggaauggguagaggguauuuguuguuucacagagaacagcaaacucuucccaucuuc

SEQ ID NO: 4195991 - RNA, 82 nt, Human
ggaauguggaggaagggauucagaccaggugaucucugugggucucuugguggucugauauuuuuucuuaccuuugaauucc

SEQ ID NO: 4195992 - RNA, 79 nt, Human
ggaauguuucagaauaucgauucagugaacuucuguuguacaaagcuuuaucucauuguugauaugcugucugcauucc

SEQ ID NO: 4195993 - RNA, 78 nt, Human
ggaauuagaggauaaggauuuaaguuugcauuacucaguauaugagugugugaccuuuuaauuuaauuucccugaucc

SEQ ID NO: 4195994 - RNA, 95 nt, Human
ggaauuagccucuucgacuggggcggaguagcuggggugugagaaaagaacaccuucauacaacuuccagcuuucagccccuuggagagauuucc

SEQ ID NO: 4195995 - RNA, 77 nt, Human
ggaauuagcucucuaaaugcccuacaaugacuggcugccuugucaguccucugagggcgauuugaguaccuaacucc

SEQ ID NO: 4195996 - RNA, 70 nt, Human
ggaauuaggcagcauggauucugaauaccagccuuaucuuugguuuuugaaugugugugcuuuucuuuuc

SEQ ID NO: 4195997 - RNA, 90 nt, Human
ggaauuagugaaagaccuuagaauucacaggagguauuuguccuucacgcgaguguagaccaaacguaaccuaugaguuucuuuuauucc

SEQ ID NO: 4195998 - RNA, 71 nt, Human
ggaauucuucagaauaucuggcacugaaacauauuggcuucaauuaaaaggcuaugauuucugugaauucc

SEQ ID NO: 4195999 - RNA, 62 nt, Human
ggaauucuugaaugcuaugguucugauucuagaauucucagguucuacaguuuuagaauucc

SEQ ID NO: 4196000 - RNA, 78 nt, Human
ggaauugaaucauugagaugcugauugaauuguuguugaugguucaacaauuuugagaugagacagaucaaauuuucc

SEQ ID NO: 4196001 - RNA, 57 nt, Human
ggaauugcuuaucuuguugaauagggcauauuucucaagacauuaauaaguaguucu

SEQ ID NO: 4196002 - RNA, 56 nt, Human
ggaauugugauucaggcugcuccuuucccugguccccagcccuugauuuacaaucc

SEQ ID NO: 4196003 - RNA, 83 nt, Human
ggaauuuagagucccuggguuuuaccgagucuccacugacuagcagugcagcugugggagaaucucuggguuucugggacucc

SEQ ID NO: 4196004 - RNA, 77 nt, Human
ggaauuucgacgugauccacuuaaugcaugguagcagggccagagugaaauaggggaucaagcuguggggauaaucc

SEQ ID NO: 4196005 - RNA, 74 nt, Human
ggaauuugggucacaagguacuguaagaaaaauuaaacauuaguuuucaugaauuuccuugagaaacagguuuu

SEQ ID NO: 4196006 - RNA, 63 nt, Human
ggaauuuuaagcauaugacugguuuguaggguaagucauuaugagccaaugcuuaugaguuuc

SEQ ID NO: 4196007 - RNA, 72 nt, Human
ggaauuuugccugggcuaguaagccagaauaauacauuuuugcuugaacuuggcucuuaggaaaauaauuuc

SEQ ID NO: 4196008 - RNA, 103 nt, Human
ggacaaaacacacacacacacacacguauccacauauguauacauauguacacaaguacauacuuauguguauaugugugugugugugugugugugugugucc

SEQ ID NO: 4196009 - RNA, 74 nt, Human
ggacaaacaaagggauggagcccagcuguucuccagccucccugaggacaaaggguuccuccugugaacugucc

SEQ ID NO: 4196010 - RNA, 55 nt, Human
ggacaaagcaguauauugguaguuguuaauauagcagugcuagcucugccugucu

SEQ ID NO: 4196011 - RNA, 63 nt, Human
ggacaaaggguuguauauaauggguaaauuucuggcccaguuuaucugugauccuaaaugucu

SEQ ID NO: 4196012 - RNA, 64 nt, Human
ggacaaaugagcccuaauuuacaacaucuagucuuucuagaugcuaaggagguugccagugucu

SEQ ID NO: 4196013 - RNA, 61 nt, Human
ggacaacauguuuuaauuaaggaauguugaucaggcaauugugcuuuaaaaacauguuucc

SEQ ID NO: 4196014 - RNA, 56 nt, Human
ggacaagccugugaguggguuucacucaguggaaucccuccaagcaggucuuguuc

SEQ ID NO: 4196015 - RNA, 105 nt, Human
ggacaagggaauguauggcauuacaagucagaauaauguuucuuuugagaaaagaggauucaagagcugaacauuuuugacauguuuaucuauucaucuauguuu

SEQ ID NO: 4196016 - RNA, 82 nt, Human
ggacaauguggauucuuuagcccagaaaguuaaauaccuccaacuuuggcaguccugaccuucuggguagagaauauaguuc

SEQ ID NO: 4196017 - RNA, 59 nt, Human
ggacaauguuugcugcuaaggucaguacaguggacuauuuuguccuuagugcaggguuc

SEQ ID NO: 4196018 - RNA, 88 nt, Human
ggacaauuuguguaacaaggagcuuggggaauugacuucuuauuggcccagaaauuguaaauauucccucgguuccuacaacuuaucc

SEQ ID NO: 4196019 - RNA, 73 nt, Human
ggacacaggcacucauucagagagguggcagaguaauaacugaaaauguccccauaucaugaggccugaguuc

SEQ ID NO: 4196020 - RNA, 64 nt, Human
ggacaccuaccugggccuuucugccaugcggcaccauaaaaauaagagaugccugugggugucc

SEQ ID NO: 4196021 - RNA, 79 nt, Human
ggacacguccauguauuuuggggaaggccugggugucaugggauaaguucaguuguccccaaaauauacggacaugucc

SEQ ID NO: 4196022 - RNA, 64 nt, Human
ggacacugugcuagcugggcuuauccuucuuacugggauggcagaagcacaacacggcaagucc

SEQ ID NO: 4196023 - RNA, 74 nt, Human
ggacacuuuuugguauggcauagccauucugcuuaucaggggauguuagaacuggcggcuagaccacuguuuuc

SEQ ID NO: 4196024 - RNA, 78 nt, Human
gcugucuugccauuuguuuagcaaagucugaguugaucaauuuuaaauagcacuuccugaacacauuaagacuacagc

SEQ ID NO: 4196025 - RNA, 60 nt, Human
gcugucuuuccccugcuccagaucuuguuacuuuccuuuuggauuacugggcgggacagc

SEQ ID NO: 4196026 - RNA, 57 nt, Human
gcugucuuugcuaggaaagaggagaaauauucugcuuucagcugguaaagaaacagu

SEQ ID NO: 4196027 - RNA, 71 nt, Human
gcugugaaauguuaacaauagaguuucuucaggaucaaauucuguguagucacuauuuuaacaucuauagc

SEQ ID NO: 4196028 - RNA, 95 nt, Human
gcugugaacguugaacucccaccaguacagaugguagauguagaaggagaagucgucauccccacugcugcugguguaggagaggacguagcggc

SEQ ID NO: 4196029 - RNA, 128 nt, Human
gcugugacguagacccuaugacacgcuuauucaaaccccauagacaacuugcagcuaggaugaccccucagaguugucucaaaugggguuaaaauggcugaguguuuauacucugccccuucaucagu

SEQ ID NO: 4196030 - RNA, 60 nt, Human
gcugugagcaguguaaguacugggaguauugucaguguaaauguuuacauugcucgcagu

SEQ ID NO: 4196031 - RNA, 80 nt, Human
gcugugagcuguguguuucacccugacaccaacauuuuuuacauuuguuguuauaggugguacaagcaaaauuucacagc

SEQ ID NO: 4196032 - RNA, 130 nt, Human
gcugugagugaugagaagggaagaauugcacuggggccagcugaggccgugcaggcugcagaccacccccugcccagcucagcgacuccuuagucucccugccuucucuaagccucaucugaacagagac

SEQ ID NO: 4196033 - RNA, 126 nt, Human
gcugugauucugcuuuguggacuuuacacaagcugucacaauaucccaaucugccacagauguucuggguagcauugguuuuauugggugauaagggccacguggcagacucguacccacuauagc

SEQ ID NO: 4196034 - RNA, 62 nt, Human
gcugugcaucuucauucuggacccuggucuuugcuacaggggcucagugaugucugcagagu

SEQ ID NO: 4196035 - RNA, 67 nt, Human
gcugugccucagacggggccaucucccagguuucucuaccuggcccaggcauccuuuuggucacagc

SEQ ID NO: 4196036 - RNA, 84 nt, Human
gcugugcuacagcccccguuuuuaggaaauuggugcuuggcaaacgaugaaaaguuucacagaauaugaagguuauggcacagu

SEQ ID NO: 4196037 - RNA, 57 nt, Human
gcugugcucaacgugccuuccuccuauauauuugaggaagaggcacuuuauuacagu

SEQ ID NO: 4196038 - RNA, 65 nt, Human
gcugugcugauuauuagugucagguugguuguuugaagggcucauggcagggguaguaguacagc

SEQ ID NO: 4196039 - RNA, 67 nt, Human
gcugugcuuuugguagaucccaagcaaggacauaagguucccagcauggaauccccaagaaagcagc

SEQ ID NO: 4196040 - RNA, 57 nt, Human
gcuguggaugcuauggaucauccucuucaaaggcaauuuuuccuuggucucuauagc

SEQ ID NO: 4196041 - RNA, 55 nt, Human
gcuguggccgggcccaggccgccagggacgcuuugagacauggaccggccacagc

SEQ ID NO: 4196042 - RNA, 79 nt, Human
gcugugggccaggaggccucaguggcuccaggauaccagggggaccugcucccugcacucaggcccaccugccuauagc

SEQ ID NO: 4196043 - RNA, 87 nt, Human
gcuguggucaguuugugcuaggcacuauuucucaauuuccuuggcugguccucagagauacuguucugguuuacaagugucuguagu

SEQ ID NO: 4196044 - RNA, 72 nt, Human
ggagucugcgggugaagcuccugcaggggcccgcgauacagcagggcagcaggagcucgcuccacuggcucc

SEQ ID NO: 4196045 - RNA, 88 nt, Human
ggagucuggcucugccacccaggcuggagugcaguggcacgaucucugcucacugcaagcuccgccucccggguucacgccauucucc

SEQ ID NO: 4196046 - RNA, 61 nt, Human
ggagucuggguccgggggugaauugagcccgagcucagucccagugcuugccuuugcugcc

SEQ ID NO: 4196047 - RNA, 62 nt, Human
ggagucuguuuuacaugcaggacagggaucuuuucagcauguaguucagaucauguuauucc

SEQ ID NO: 4196048 - RNA, 87 nt, Human
ggagucuugcucugucaccaggcuagagugcaguggcgcuaucucagcucacugcaaccuccgccucccagguucaagcgauucucc

SEQ ID NO: 4196049 - RNA, 88 nt, Human
ggagucuugcucugucacccaggcuggagugcaggggcgcgaucucggcucacugcaaccucugccucccggguucaagugauucucc

SEQ ID NO: 4196050 - RNA, 88 nt, Human
ggagucuugcucugucaccgaggcuggagugcagugaaaugaucucggcucacugcaagcucuaccucccagguucaagcgauucuuc

SEQ ID NO: 4196051 - RNA, 88 nt, Human
ggagucuugcucugucgcccaggcuggagugcaguggcgcaaucuccgcucacugcaagcucugccaccuggguucacaccauucucc

SEQ ID NO: 4196052 - RNA, 90 nt, Human
ggagucuuguucuguccagcccaggcuggaguguagugacacgaucucagcucacugcaaccuccaccuccuggguucaaacaauucucc

SEQ ID NO: 4196053 - RNA, 88 nt, Human
ggagucuuucucugucacccaggcuggauugcaguggcaagaucucugcucaccgcaaccuccgccucccggguucaagagauucucc

SEQ ID NO: 4196054 - RNA, 120 nt, Human
ggagugaaaguucccaccacccuuucucuuacccgcuggggaguagggcuguauuguuaaggagccauggcgccacuagagggaaguauuggauagggaggaaaagaaacuucacauucc

SEQ ID NO: 4196055 - RNA, 56 nt, Human
ggagugaaguggcgcgaucucggcucacugcaagcuccgccucccggcuucacgcc

SEQ ID NO: 4196056 - RNA, 85 nt, Human
ggagugaggcccagagaagugaagugacuugcccaaggucaucuagccaggggguaaaggguucauuagcugggguucuuacucc

SEQ ID NO: 4196057 - RNA, 100 nt, Human
ggagugaggcgcaggcugugggugcaccaguggggcauccaccacggagaaugugggugcucccauguguggguacagacgccuggaggguccuggcucc

SEQ ID NO: 4196058 - RNA, 94 nt, Human
ggagugaguagguucucugacuucuucauccuugccauuggggugaccuaauuaccuggcaucggaaugagggacagaaaaguuucaccacucu

SEQ ID NO: 4196059 - RNA, 55 nt, Human
ggagugaugcuugcugccuccaaaaccuggagagcccuacaaggcguuuugcuuc

SEQ ID NO: 4196060 - RNA, 58 nt, Human
ggagugcaaagugcauggggaagggugcauguccuccauggcaggacuuugacaaucc

SEQ ID NO: 4196061 - RNA, 73 nt, Human
ggagugcaguggcaagaugacuacucacugccaccuccaacuucuaggcucgagagauccucuugccaccucc

SEQ ID NO: 4196062 - RNA, 55 nt, Human
ggagugcccugugaacuguaaggaauuucagucccuucauucacagaggcauauc

SEQ ID NO: 4196063 - RNA, 57 nt, Human
ggagugcuccaaauuuguaugaagaucaaggucacauauucaaaacuggaccacucu

SEQ ID NO: 4196064 - RNA, 83 nt, Human
ggagugcuugcaugaucaaugacagguuaucuaugaaaagcagugaauauaugauauucuaaauugacaccacaaguaccucc

SEQ ID NO: 4196065 - RNA, 77 nt, Human
ggaguggaagugauuguuccguugagugucuauugacccauuaaauacaccagauaagaacuaaucuuguucuaccc

SEQ ID NO: 4196066 - RNA, 83 nt, Human
ggaguggagccugguaaccgcgacuuccccgccauguucuguguguugcuggcuggagaagggugguugacaaacuccgaccc

SEQ ID NO: 4196067 - RNA, 88 nt, Human
ggaguggaugaaggcaacaaaagucaaauauagguuuuaaguggaaacuaagaauguucaacgcuuuuuugcucuuuuaucuuucucc

SEQ ID NO: 4196068 - RNA, 57 nt, Human
ggagugggaaagcugccuuguagaucccagaguuuacaagucuguugaucccaaacu

SEQ ID NO: 4196069 - RNA, 114 nt, Human
ggaguggggcaggcccuggacuggcuguguggccucaacuugucacuguucuuucucugagccucaguagacucaacugcaaguggggcuugucauucuuggccugcuugcuuc

SEQ ID NO: 4196070 - RNA, 82 nt, Human
ggagugggugggggugagaggcuggcugagcgcagcacccagucaugcuccucagugucuucucuuuccuaccuucccuucc

SEQ ID NO: 4196071 - RNA, 82 nt, Human
ggaguguugucugagagccagugugguaucugaagaacgugaguucuaaagucaggacaaccuguuuucagacacccacuuu

SEQ ID NO: 4196072 - RNA, 122 nt, Human
ggaguuaacggcagugacucacuuggggcauucacagcaggucagcugaaacucucccuugcuguauagagaauuuaguccugcugggcaugcgcccaagacugugagcugagguugauaac

SEQ ID NO: 4196073 - RNA, 59 nt, Human
ggaguuaaguagaugaaguuuuugguaaauaaccaggcuucaccagacucuuaaucucc

SEQ ID NO: 4196074 - RNA, 67 nt, Human
ggaguuagucauguaugaaggagcacauuucuacauaaaaauucuucuuaaauauuuggcugacucu

SEQ ID NO: 4196075 - RNA, 129 nt, Human
ggaguucuggcagcaggagggcugagccuggagccuccugggccuugcucugugauguggguagggagucaccagucaugagcacaggugcagggaccccagucuuucucucugcuuccuaaggucucc

SEQ ID NO: 4196076 - RNA, 83 nt, Human
ggaguucuggcaugcagucaaccaguaagggaauguuucacaacaguaauaaccccuuaccagcugggacugccccaugcucc

SEQ ID NO: 4196077 - RNA, 83 nt, Human
ggaguucuggucgugucacccaggcuggagugcaguggcguaaucuugcgcagccuccaccuucuggguucaagcgauucucc

SEQ ID NO: 4196078 - RNA, 92 nt, Human
ggaguugaaggaaagaaucaagugcaaugaauagcugcaauuacaaauuagguaauugggcauggaugcauuugcuuuacuuugcacacucu

SEQ ID NO: 4196079 - RNA, 71 nt, Human
ggaguuguuauagaauguaagaaugcaaagauugaauggucaaugugguauuuuggcauucuuccaaaucc

SEQ ID NO: 4196080 - RNA, 118 nt, Human
ggaguuuagggugaaggauuugaugguaaagcagcuuaaauuagagccugagaggaguccuuaaacaaauucuaauuagagcuggcaauuuuccaaaaauaauuuuuucuuuaauuuc

SEQ ID NO: 4196081 - RNA, 77 nt, Human
ggaguuucaauauuuuugggaaagugcuguagaugauugcuggguugggcaguguuucccagagauggaaagaaccc

SEQ ID NO: 4196082 - RNA, 89 nt, Human
ggaguuucacccuugucacccaggcuggagugcaguggcacaaucuuggcucacugcaaccuccaccuuccggguucaagagauucucc

SEQ ID NO: 4196083 - RNA, 89 nt, Human
ggaguuucacucuugacacccaggcuggagugcauuggcaugaucucagcucaaugcaaccuccgccucccagguucaagcaauucucc

SEQ ID NO: 4196084 - RNA, 85 nt, Human
ggaguuucacucuuguugcccaggcuggaguguaauggugugaucuccgcucaccgcaaccucugccggguucaagugauucucc

SEQ ID NO: 4196085 - RNA, 90 nt, Human
ggaguuucacucuuguugccgaggcuggagugcaguggcgcaaucucggcucacugcagccuccgccuuccagguucaaagcgauucucc

SEQ ID NO: 4196086 - RNA, 89 nt, Human
ggaguuucacucuuguugcucaggcuggcgugcaauggcaugaucucggcucacugcaaccuccgccuccuggguucaagcaguucucc

SEQ ID NO: 4196087 - RNA, 89 nt, Human
ggaguuucgcucuuauugccgaggcuggagugcaguggcgcaaucucagcucaccgcaaccuccaccucccggguucaagcgauucucc

SEQ ID NO: 4196088 - RNA, 89 nt, Human
ggaguuucgcucuuguugccuaggcuggaguguaguggcacaaucauggcucaccacaaccuccgccucccggauucaagcgauucucc

SEQ ID NO: 4196089 - RNA, 89 nt, Human
ggaguuucggucuuguugcccaggcuggagugccauggccugaucucggcucaccgcaaccucugccucccagguucaagcgauucucc

SEQ ID NO: 4196090 - RNA, 89 nt, Human
ggaguuucguucuuuuugccuaggcuggagugcaauggcacgauauuggcucauugcaaccuccgccucccagguucaagugauucucc

SEQ ID NO: 4196091 - RNA, 57 nt, Human
ggaguuucugucaucccguccccguggcaacgccccccgggaaugauggaagacuuc

SEQ ID NO: 4196092 - RNA, 76 nt, Human
ggaguuugaauuuuauucuaaguuuaaugccaucaauuagaggcuuuauuaagcaggguaaguaaauguagacucu

SEQ ID NO: 4196093 - RNA, 62 nt, Human
ggaguuugagaccagccuggccaaaauggcgaaaccagacuggccaacauggucucaucucu

SEQ ID NO: 4196094 - RNA, 62 nt, Human
ggagacccauccggaccccaucacugccugucuaagcagagccagguguagucucggaggcc

SEQ ID NO: 4196095 - RNA, 89 nt, Human
ggagacgaagagaggcaaacugaacacgaaagucuuucuuguugaguuuaagaaaaaaucuuuuucuucaguuguuauuuuuuguuucu

SEQ ID NO: 4196096 - RNA, 69 nt, Human
ggagacgauuucagguuuggacauaaagaauuuguaauuauguugagauguccagccugcuguuucucu

SEQ ID NO: 4196097 - RNA, 67 nt, Human
ggagacgcagugcauguggcacucuccagguggccacccucagccacucacaugcauauucguuucu

SEQ ID NO: 4196098 - RNA, 73 nt, Human
ggagacuagaggugugcaugauuuagcacuuuaguacacuuuaguguacauguacacauuaguauacauuucc

SEQ ID NO: 4196099 - RNA, 57 nt, Human
ggaccauggcuuuccaguccuccacucuccauuugaguguagacauaggucuggucu

SEQ ID NO: 4196100 - RNA, 57 nt, Human
ggaccauguguggagagucaguuacuucccucuguggggcugacccuuuuacauucc

SEQ ID NO: 4196101 - RNA, 121 nt, Human
ggacccagagggccugcuuuggccggggugaauucucuggcuucaguaggguucacuuccuuuccugacaguggcuucucuggggucaagagagagccugggccuaggagaucuagggucu

SEQ ID NO: 4196102 - RNA, 83 nt, Human
ggacccaucuuacagacuugugccuccuuggcuguccugccuggucagccccuuggaacacagggcuggcccuaaguuggucc

SEQ ID NO: 4196103 - RNA, 55 nt, Human
ggaccccgauugugccagugguuaacccuuuagcugcugcagcacagggaggucc

SEQ ID NO: 4196104 - RNA, 59 nt, Human
ggacccggccgggaacuggcaguagggaggcccccgcugcagucgccggccugggugcc

SEQ ID NO: 4196105 - RNA, 56 nt, Human
ggacccucccagcucacgcaccauggcuugaaacugcagcacagcuaggagggucc

SEQ ID NO: 4196106 - RNA, 58 nt, Human
ggacccugcuacugucugaaacacucguguauguccucagugcugccauggcagggcc

SEQ ID NO: 4196107 - RNA, 76 nt, Human
ggacccugucgcccugaaggccuguuugcugcacaucugccugcagagccaaaccucagggcccggugcagugucc

SEQ ID NO: 4196108 - RNA, 64 nt, Human
ggaccgaagcuuacaguuccacguagcagcucaucucacuguuaaggaaacugugggguuagcc

SEQ ID NO: 4196109 - RNA, 76 nt, Human
ggaccgcuggacggcacauaugcuuuggaaagggagcaccucccuuggcucugucgccguuuggaauaacuggucu

SEQ ID NO: 4196110 - RNA, 126 nt, Human
ggaccuaagcugguacucuguuacauuucaugagaggaggucaggcugaauugaagauaguauguucaccucaccacccuuaugguucuggcagcuuaaaccuagccuucauuuauuuuggcgucc

SEQ ID NO: 4196111 - RNA, 74 nt, Human
ggaccucacggccuccuuuguguuguccauggaagaccaacuuccgggcaacugaagggagguuuguagggucc

SEQ ID NO: 4196112 - RNA, 84 nt, Human
ggaccucccuuccccagcccauggccagaaccaagcuccacuccaagguggauguggcugccauggagccugggacugugguuu

SEQ ID NO: 4196113 - RNA, 57 nt, Human
ggaccucgaaacauagcaguucuaaacaaguaugugaacugcuggucuuuucugucu

SEQ ID NO: 4196114 - RNA, 107 nt, Human
ggaccucuaggggagucagaaucaguauaagagugaggaagggcauggccuacaugcuauaauauuuuuguucuauguauauuacuuuuugauguuccugaaaggcu

SEQ ID NO: 4196115 - RNA, 73 nt, Human
ggaccucucaggaucugauguugugaaaguuacuuucaaagguuaacaacuguuagacacuucuaaggggucu

SEQ ID NO: 4196116 - RNA, 55 nt, Human
ggaccuggcuucuauaccaccaggugucuugcacccaugaugucugaagucaucc

SEQ ID NO: 4196117 - RNA, 56 nt, Human
ggaccuguucuaaucuuggggcagagaagacucucaguaugacuagagcaggggcc

SEQ ID NO: 4196118 - RNA, 70 nt, Human
ggaccuugguauagcauuagcccucaggaaauggauccucugagguguugaugaccuaugcaaaaaggcc

SEQ ID NO: 4196119 - RNA, 98 nt, Human
ggacgacuagccacucccuggggugaggcagcugagcacagcuggugucugccagaggccaggcugccugacugcccaacugggaagggcuugucucc

SEQ ID NO: 4196120 - RNA, 64 nt, Human
ggacgccugcucucacuggacagcugcucucacuggacagcugcucucacuggacgccugcucu

SEQ ID NO: 4196121 - RNA, 58 nt, Human
ggacgcuggcuccgccuuccccauuuaugcagcuccuggggagacagggccagugucc

SEQ ID NO: 4196122 - RNA, 128 nt, Human
ggacggaggaguuuccagguaguagaacucagugcaaauauugggacagucuagaaaauuaggagaguuaucuccccuauggcaaugcccaauguuguacagcgcuaacaaucuuuuuuuuuuuuucc

SEQ ID NO: 4196123 - RNA, 79 nt, Human
ggacggugcaggcuaagugagcuggcuaggaguucgggugccuggcuucucucccuggcacucagaccugcacccaucc

SEQ ID NO: 4196124 - RNA, 94 nt, Human
ggacguuaguaccuuggaaugccuuggcucaggccaccuugucuuccaaagcacacaagaugugucucaucagggugucaaggugccagcguuc

SEQ ID NO: 4196125 - RNA, 113 nt, Human
ggacuaagugaagcucugcagugcacugaacaggcccuccugcucaaaauaccaguagcagaacagacuuaacagggcuguucagugcaccgcagagcuucauuuccuggucc

SEQ ID NO: 4196126 - RNA, 73 nt, Human
ggacuagauguguagagggaauuucaaauaauguauuuaaaaaauuauuugaagucuguuuuauacuuauuuc

SEQ ID NO: 4196127 - RNA, 129 nt, Human
ggacuagguagaagacagaggggaaagucauaaaaacaaugcuggucugcagaguugggagcccuggauuuuagcuccagcccugcacugauuagauaauuuugagaagucacuuugccauccugaucc

SEQ ID NO: 4196128 - RNA, 86 nt, Human
ggacuaucugaacauuuauugcuuaaaaaauaugugaguuugugagcuuaucccagcauuuaggcaguaagugacaagauaugucc

SEQ ID NO: 4196129 - RNA, 76 nt, Human
ggacuaucugugccuucucccagacuuagcaacuuauguuagagcucuguggagagagaacugcuugcagauguuc

SEQ ID NO: 4196130 - RNA, 78 nt, Human
ggacuaugccuucucucugcggccuuagcgggggcugagggcuccaaggaaccugcagcuguaggagaaggcgcgucc

SEQ ID NO: 4196131 - RNA, 67 nt, Human
ggacuauuggcuauguuucgaugaacagauucaacaugauaaaauauaugaacaugaccaauagucc

SEQ ID NO: 4196132 - RNA, 60 nt, Human
ggacucagcccagcccagcaagugcagccgcuuucagcuccgccucuggcuggguucucc

SEQ ID NO: 4196133 - RNA, 79 nt, Human
ggacucccagagaccccgcugcccuucugagcugcugcuuuccaacuuaggaauugcccgugggguccucacggagucc

SEQ ID NO: 4196134 - RNA, 90 nt, Human
ggacucccuaaucugcugagcccaucuugauuguauuucugcugcccuuucacagucccuaguggagcucacagucccuagugguuuucc

SEQ ID NO: 4196135 - RNA, 58 nt, Human
ggacucccuugacuagguguaaggaugugcucuugagaugcugggaacaaggaagucc

SEQ ID NO: 4196136 - RNA, 69 nt, Human
ggacucucuggagucuuauccccagcccccagguggauaaugagaacugggagacuccagaacugaucc

SEQ ID NO: 4196137 - RNA, 61 nt, Human
ggacucugccuuuguggucgggagaaugauaguuucuccauuuuacagauaaggcagcucc

SEQ ID NO: 4196138 - RNA, 62 nt, Human
ggacucugcucuguccugaaaaccuggaaucauaacauuucauggcuaggacuagagugucc

SEQ ID NO: 4196139 - RNA, 64 nt, Human
ggacucugcugguuuuguucacugcuguauccccggagcccagaacagugcuuaguagauguuc

SEQ ID NO: 4196140 - RNA, 64 nt, Human
ggacugaaaucuuuccaugucagugccccauguaggaguauuuaauggaguagaauugcaguuu

SEQ ID NO: 4196141 - RNA, 64 nt, Human
ggacugaacacuuaaauguccagaaaaauguggaaguugggcauucuuagggaagugcaggucc

SEQ ID NO: 4196142 - RNA, 90 nt, Human
ggacugaaccugagucuuuugauuugcuuuucacagcuacuugaugcugccauggggauuguaaaccagaaaacucaacaggucaggucu

SEQ ID NO: 4196143 - RNA, 55 nt, Human
ggacugaagccaugugcucacugguacaaaaaccaggaagcuauaguguuagcuc

SEQ ID NO: 4196144 - RNA, 55 nt, Human
ggacugagacggcuccaaguguccucagaguggggcagaaaggaaucuuaggucc

SEQ ID NO: 4196145 - RNA, 61 nt, Human
ggacugccguuacaaacacacaaacuuggugauuucauagaaguuuguucuuguauagucu

SEQ ID NO: 4196146 - RNA, 59 nt, Human
ggacugcuccagugugauuugucuucaucacccaagugugagucucacccaagcagucu

SEQ ID NO: 4196147 - RNA, 124 nt, Human
ggacuggagagacugagauucagagacaaugucucugcuuguggaucacccuggccaugucacaagccuguuagauguugugcucucuccacuauaaucacaaauaucagaacucucucugucu

SEQ ID NO: 4196148 - RNA, 71 nt, Human
ggacuggauuuuguuugacugauguuuguuuauucauucaacaaacauguaccuacaaucagaauccaucu

SEQ ID NO: 4196149 - RNA, 67 nt, Human
ggacuggccaggcagcaguagcuuuccccugcuggggauccgggcccugggcugccuugggcauucc

SEQ ID NO: 4196150 - RNA, 87 nt, Human
ggacugggaaggcaugcauaguuuuucuagaaggguuuuuaaguuccuccccacccagagguccugugaugcugcaccucgcugucc

SEQ ID NO: 4196151 - RNA, 64 nt, Human
ggacugggagaauggaggcaagaaaagggcauaguuugacucccucugugucucuucccaguuc

SEQ ID NO: 4196152 - RNA, 58 nt, Human
ggacugggccagggguuggacucugugcaggacgcugagucacccguggaccagcucc

SEQ ID NO: 4196153 - RNA, 87 nt, Human
ggacugggucuggaaacugcggaaggcagcgcaggguggaaguguucggacucagcccuggccucuucgcuuuccagcaccagcucc

SEQ ID NO: 4196154 - RNA, 87 nt, Human
ggacuggugggagcuucauggagcuguagggagcaguggucaaguguucuacugacucaaguuccaucagcaguuucccaguagucc

SEQ ID NO: 4196155 - RNA, 57 nt, Human
ggacugucagcuuggugagggaauccagaugaauuucccuuuucaagccaucaguuu

SEQ ID NO: 4196156 - RNA, 72 nt, Human
ggacuucuuauggcuguagucuggaagugaugcauauaauugccauucacaguucauuagcuguaaguagcc

SEQ ID NO: 4196157 - RNA, 89 nt, Human
ggacuugagagcucccugugguuuacucuguggcuagaaaacacugccggccagauggaucacaaaugucuaugguagcuuagaagcuc

SEQ ID NO: 4196158 - RNA, 79 nt, Human
ggacuugauguaaagugauucaugggagaaguucuacucauguccuaagcucauccuaugugucaagauauuaauuucc

SEQ ID NO: 4196159 - RNA, 85 nt, Human
ggacuugauucaugaaaauguauuugcauccugaugauacuuuuucaguugucuagauucauauauuuuuggagaagcugagucc

SEQ ID NO: 4196160 - RNA, 78 nt, Human
ggacuugugacugugaccuuauuggaaauggagucuuuacagauggucaaguuaagauaaggugaucagggcaggucc

SEQ ID NO: 4196161 - RNA, 55 nt, Human
ggacuuguuaucugugccacgggguuuagccuugcugucucaugggugcuagucc

SEQ ID NO: 4196162 - RNA, 93 nt, Human
ggacuuucuguuagggcagcacaaggcauggacucaauccuauaggucagcauccagauccccaguccucugcugugcgucuuuggaaaguuu

SEQ ID NO: 4196163 - RNA, 83 nt, Human
ggacuuugcuucuuggaauucuguggcugacccuuuucacucuucccugauuccgcagacaaagaaaccguagaagcaagucc

SEQ ID NO: 4196164 - RNA, 55 nt, Human
ggagaaaaggcugcuuacucagcucccucugcuccaagucacagaccuugucucc

SEQ ID NO: 4196165 - RNA, 60 nt, Human
ggagaaaauugaaucaguagcugauguggaaguauuuugcuagcuuguucaauuucaucc

SEQ ID NO: 4196166 - RNA, 63 nt, Human
ggagaaacucagugaauuuucaucaaauuggauagagcccagcagugauuuuacugaaucucc

SEQ ID NO: 4196167 - RNA, 81 nt, Human
ggagaaacuugccugccaggcaaccugggagucuuaaucugaucagaccucacucuuguccuggcaggucuagucccugcc

SEQ ID NO: 4196168 - RNA, 73 nt, Human
ggaaagaaagauaugaugggcaggauuuuaaguugaaucucaaugaccccuguuccugucaaauuuucuuccc

SEQ ID NO: 4196169 - RNA, 83 nt, Human
ggaaagaauggaaagucuucacggcacuaguguucagcuucuagguuuacauguggucaaucuguguaggaugaauucuuucu

SEQ ID NO: 4196170 - RNA, 56 nt, Human
ggaaagacauuagcuuagaugucagcaagcuaagucucuuagagcuauguuuaucc

SEQ ID NO: 4196171 - RNA, 59 nt, Human
ggaaagagcccagcagugcuugccacuuucuuagacugagaaguaaggugggcucuucc

SEQ ID NO: 4196172 - RNA, 77 nt, Human
ggaaagaguaugggagcuuuacucuguucagaaaggagaauuuauggaaguauagcucacaaucuaugaucugcacc

SEQ ID NO: 4196173 - RNA, 72 nt, Human
ggaaagauaaguagggcaauuugugggagccuguacacuauuuaacuucccagggagugcuacuaucaagcc

SEQ ID NO: 4196174 - RNA, 90 nt, Human
ggaaagauugcucuaucacagugaugggauccuagcauguuauaaaucgaagauuguucuuuccugccacugagaugagcagcucuuucu

SEQ ID NO: 4196175 - RNA, 90 nt, Human
ggaaagcaaguggggccauugaggugggcagagggagauguuuauuuucugcauucuucugccuacuuucauccauccacuuacccagcc

SEQ ID NO: 4196176 - RNA, 73 nt, Human
ggaaagccugccugggucacccaaaagggccaggccauccuguuuaccugguggguaaucugguggguucucc

SEQ ID NO: 4196177 - RNA, 78 nt, Human
ggaaaggaagaagcauucuuucauugguugguguguauugccuugucaaccaauaagaggaugccauuuauccuuuuc

SEQ ID NO: 4196178 - RNA, 57 nt, Human
ggaggggccucugcuccacaggaucacucagggacccaggcuggcagaggcuccucc

SEQ ID NO: 4196179 - RNA, 76 nt, Human
ggaggggcguagacuuaacauccuguuuaaauuuggcauuagccgaauuuuuuaacagggguuaugaccccccucc

SEQ ID NO: 4196180 - RNA, 68 nt, Human
ggaggggcuuaggacccagcccauggaggcugaauggggcugcaaagggcauggccugagcacuuuuc

SEQ ID NO: 4196181 - RNA, 102 nt, Human
ggagggggcaggagggccgggggaggccgcgaagggccugcucgcaaaccguuauaguccuucagcaccucccucggccgguggcccuccuagccugccucc

SEQ ID NO: 4196182 - RNA, 70 nt, Human
ggaggggguggugccacguguggcucuguggacggcuccgacgacccugacagugugcuucucucccucc

SEQ ID NO: 4196183 - RNA, 104 nt, Human
ggaggguauguggaaaggguaacagcaugacccaaccuauguccuuggcauccucacucaaccaggcaauagguuccucaucuuugacccuuuggaugccuucc

SEQ ID NO: 4196184 - RNA, 81 nt, Human
ggagggucuuuacagagaacucauagaaagaaagagugcugcgauauuccuucuucccuuucugcagguucuuuuuucucc

SEQ ID NO: 4196185 - RNA, 60 nt, Human
ggaggguggcagcguccugggcuccaugcacuuggccaaagaggacuucugaacccgucc

SEQ ID NO: 4196186 - RNA, 102 nt, Human
ggaggguguggggcugcagggcugcuccaaggcucuggugcugaggcgucucacugccuccaccaugugcuuuggcuuuggcuaucagcugggacacccucc

SEQ ID NO: 4196187 - RNA, 78 nt, Human
ggaggguucgugcagcagcuguugacugguacaugaagcauucuuuuauguuuguugaagcugaugauugacaucucc

SEQ ID NO: 4196188 - RNA, 117 nt, Human
ggaggguugagcuuccaugugaccagccaggccucaggagcagggaccugcuggaccccagccugccacuggcccggggauccuggcagugggaagcuggaaguccauucagacucc

SEQ ID NO: 4196189 - RNA, 70 nt, Human
ggagguagagagugcggacugugucuuacaagcaggcaaagccgaggcaaggccgcacgucucagccuuc

SEQ ID NO: 4196190 - RNA, 118 nt, Human
ggagguagaugacaaggccacaaaauccucagggagcuagcuucuuccagguuucuacucugccauuccuagggagccuggucagguuggcuccuggaucucaccaucacugcauucc

SEQ ID NO: 4196191 - RNA, 83 nt, Human
ggagguaggagugugcagggcugccugugccgauggacuuuguacuuugcaucgguauggacccgucuuguuacccuuccuuc

SEQ ID NO: 4196192 - RNA, 94 nt, Human
ggagguauuuaauaaacaggugcagcugaaugugugugguuaaagugcaauccaguaguuauuuauuuguccagauuguuuauaaccugcuucc

SEQ ID NO: 4196193 - RNA, 63 nt, Human
ggaggucaagggugccucaugucauccaacccaggagggcuuuggagcugccacuuguccucc

SEQ ID NO: 4196194 - RNA, 63 nt, Human
ggagguccuguccugggaugguccuuccugguggggaggggucuauccugagaugguccuucc

SEQ ID NO: 4196195 - RNA, 66 nt, Human
ggaggucguguuucugagcagcagaauacucucccuguccugguguuuaucugacugccuaccucc

SEQ ID NO: 4196196 - RNA, 56 nt, Human
ggaggucugagucuauauacauugaggagauagucaacacaugauucauggcuucc

SEQ ID NO: 4196197 - RNA, 92 nt, Human
ggaggucuugaucugauuguagguguuucaugauuugguaugcacacacauacucucucacacacgccuauauagaauugucaugaauaucc

SEQ ID NO: 4196198 - RNA, 70 nt, Human
ggaggugaggccguaggguguggggugggugguacaccugcucccugucacccuccgaguccucccuucc

SEQ ID NO: 4196199 - RNA, 71 nt, Human
ggaggugauucaggccugcaucucagcaaaacuacaaauugcugcaugucacaggcccugagauaaccccc

SEQ ID NO: 4196200 - RNA, 80 nt, Human
ggaggugauugaaaggacuguuuuuucuucuagggcccuuuguugguaagagaagauugaaagaguccauuguuuccucc

SEQ ID NO: 4196201 - RNA, 74 nt, Human
ggagguggaaagcuaguuuuucuuaguuuuaaaucauuaaggguuuauaucuggaguugcuaggagcuauuuuc

SEQ ID NO: 4196202 - RNA, 69 nt, Human
ggagguggaagccuucagaacagcaucccugggaauuugcaugcugcuguugacggcuguccagccucc

SEQ ID NO: 4196203 - RNA, 70 nt, Human
ggagguggcaggaucacuugaguccagaaguuugagacuagccuggacaacauagugagaccucaucucu

SEQ ID NO: 4196204 - RNA, 57 nt, Human
ggagguggcagggaacauaauuucuguuugaaaguucuuuuguuuucugcuaccuuu

SEQ ID NO: 4196205 - RNA, 56 nt, Human
ggaggugggagacauaggcggcagggucggaggcgcgcacaguguucgccaccucc

SEQ ID NO: 4196206 - RNA, 56 nt, Human
ggaggugggaugugugugcuacuggcaucuaguggcugcuaaacauccuacacugc

SEQ ID NO: 4196207 - RNA, 75 nt, Human
ggagguuaagagcuucccuguuguagaggcuacuccaguuuuugcccuugauggggguaagcuaaagcugcuucc

SEQ ID NO: 4196208 - RNA, 86 nt, Human
ggagguuagugcagugaguggcagagcagggaaugagcucagguugcaggucccuggcuuggcacucuccacugcccuauggcucc

SEQ ID NO: 4196209 - RNA, 62 nt, Human
ggagguuucuggggaaguuuugcuuuuggauaaaagaaacaagggcacugaggaaaaccucu

SEQ ID NO: 4196210 - RNA, 88 nt, Human
ggagguuugagaaguaacaggcaugugaaugaccuaugagaaugggcaugaaauuugaaggucuuugcaucgcuuguuauuuaccacc

SEQ ID NO: 4196211 - RNA, 63 nt, Human
ggagguuuguggccagagauuaaauagaguccuuccucgaccuuucgaucucaggcugauccc

SEQ ID NO: 4196212 - RNA, 95 nt, Human
ggagguuuuuccaaucaucugaucuuguggaggcaccagcuaaugggagucuggcugccugaaugcaagacagccaauuauaugauucuuccucc

SEQ ID NO: 4196213 - RNA, 89 nt, Human
ggaguaaagcacuuuuacauguaggugacauuuuaauauagugcaaagaacuguauguuaggaagacacuuaccauggggcuuuaagcc

SEQ ID NO: 4196214 - RNA, 84 nt, Human
ggaguaaaugguguuuaucguucuggauugucugacaguuugucacacaggagucuccagguaugacaggccacuccugacuuc

SEQ ID NO: 4196215 - RNA, 63 nt, Human
ggaguaaauguguguuugugugugugggucuguguguguauaaacacugauggauauuuuucc

SEQ ID NO: 4196216 - RNA, 57 nt, Human
ggaguagauucugggaagauggcuacaggggcagcaacaucauuuuaaaaucucucc

SEQ ID NO: 4196217 - RNA, 60 nt, Human
ggaguaggaaagggacagucuaacaaggcagaaaauucuagacaguaacucuucuacucc

SEQ ID NO: 4196218 - RNA, 62 nt, Human
ggaguagguucucucagcaucccaccacguugcugguguggcagugugaccgagcuugcuuc

SEQ ID NO: 4196219 - RNA, 64 nt, Human
ggaguauaaaguguagggagcauuuucaaauuuuauuuauugacaacuuugcauuuuauucucc

SEQ ID NO: 4196220 - RNA, 85 nt, Human
ggagucaaagugggugcccugaugcuccaagaacuccucagggguggcgcagaggguagagcacucaggacacucauagggcucc

SEQ ID NO: 4196221 - RNA, 67 nt, Human
ggagucacaguuucccugagagagcugagggcauaaacaaugauaaguucuccaggggauggacuuc

SEQ ID NO: 4196222 - RNA, 55 nt, Human
ggagucaggcuagaggugagucugggauaagaacccuaguuugccaccagauucc

SEQ ID NO: 4196223 - RNA, 88 nt, Human
ggagucaugaagcaaauggagugaagagcuggaguuugaaucuggauuuuccaacucucuguuuuaugugcuuccugaucauggcuuc

SEQ ID NO: 4196224 - RNA, 56 nt, Human
ggagucaugagcaguuagugucagcucaggagcagccacaacuguccacaugcucc

SEQ ID NO: 4196225 - RNA, 56 nt, Human
ggaguccugaacagcuguugugugcccagugccaggcaaaugcuguggagggcucc

SEQ ID NO: 4196226 - RNA, 114 nt, Human
ggagucgggaucuucugggcugggggcuuggcccggucugguuuuuugcuccccuuaauggugcugaugagcuggguuuaggaaccacuugcccgagucucagauuuuggcucc

SEQ ID NO: 4196227 - RNA, 60 nt, Human
ggagucucacagcaaggagguaagguagcagauugccccucacuaaggcugugguucucu

SEQ ID NO: 4196228 - RNA, 87 nt, Human
ggagucucacucugucgccaggcuggagugcaguggugcaaucuuggcucacugcaaccuccgccugcuggguucaagugauucucc

SEQ ID NO: 4196229 - RNA, 58 nt, Human
ggagucucaggcuggaaugcaguggggcgaucucggcucacugcaaacuccgccuucc

SEQ ID NO: 4196230 - RNA, 88 nt, Human
ggagucucagucuuuugcccaggguggagugcaguggcaugaucucggcucacugcaaccuccaccucccggguucaagcgauucucc

SEQ ID NO: 4196231 - RNA, 88 nt, Human
ggagucucgcucugucacccaggcuggagugcaguggcgcgaucucggcucacugcaagcuccgccucccggguucacgccauucucc

SEQ ID NO: 4196232 - RNA, 88 nt, Human
ggagucucgcucugucacccaggcuggauugcaguggcaugaucucagcacacugcaagcucugccucccggguucgagugauucucc

SEQ ID NO: 4196233 - RNA, 88 nt, Human
ggagucucgcucugucgcccaggcuggagugcaguggugcuaucuugguucacugcaaccuccgccucccagguucaagcgauucucc

SEQ ID NO: 4196234 - RNA, 88 nt, Human
ggagucucgcugugucacccaggcuggagugcagugacucaaucucggcucucugcaaccucugccucccagguucaagcgauucucc

SEQ ID NO: 4196235 - RNA, 66 nt, Human
ggagucucugcuggggguuccuucacuguaugugcugaccauggagagcccauuggcagggguacc

SEQ ID NO: 4196236 - RNA, 88 nt, Human
ggagucuggcucuguugcccaggcuggagugcaguggugugaucucggcucacugcaagcuccaccucccggguucaugccauucucc

SEQ ID NO: 4196237 - RNA, 88 nt, Human
ggagucuugcucugucacccaggcuggagugcaguggcgugaucucagcucacugcaaccuccgccucccggguucaagccauucucc

SEQ ID NO: 4196238 - RNA, 89 nt, Human
ggagucuugcucuguugcccaggcuuggagggcaguggcaugaucucggcucacugcaaccucugccucccagguucaagcgauucucc

SEQ ID NO: 4196239 - RNA, 89 nt, Human
ggagucuugcucuuguugccuaggcuggaguguaguggcgcgaucucggcucauugcaaacuccgccucugggguucaagagauucuuc

SEQ ID NO: 4196240 - RNA, 88 nt, Human
ggagucuugcuuugucacccaggcuggauugcaguggcaugaucucgacucacugcaaccucugccucccgggugcaagcaauucucc

SEQ ID NO: 4196241 - RNA, 59 nt, Human
ggcagaggccagguccagaguuugugguaugaucggccaggcuaaggagcuugccagcc

SEQ ID NO: 4196242 - RNA, 76 nt, Human
ggcagaggcggguggaucacuugaggucaggaguuggaaaccagccuggccaacguggugaaaccccgccucuacu

SEQ ID NO: 4196243 - RNA, 55 nt, Human
ggcagagucagaggugguucugggccaaacacuaggagaagccucagaauuugcc

SEQ ID NO: 4196244 - RNA, 56 nt, Human
ggcagagucucccuguguugcccugguuucaaacuugggccaagugauucucugcc

SEQ ID NO: 4196245 - RNA, 77 nt, Human
ggcagaguggagaaagcauuuagugauggaagacucauaacucuaauuaacuacugcuuacuccaugaucucugacc

SEQ ID NO: 4196246 - RNA, 61 nt, Human
ggcagauaaacaauguuguauaggaacuucaacacacacuguacaauauucccacuuugcu

SEQ ID NO: 4196247 - RNA, 55 nt, Human
ggcagauggaaugagcugucuaccaggcgaauggugguugccaugcucucugacu

SEQ ID NO: 4196248 - RNA, 59 nt, Human
ggcagauuccaagagccugagaagcgcuguuccugccucucaggcucuuggaaccuguu

SEQ ID NO: 4196249 - RNA, 68 nt, Human
ggcagauuccuagauucuacucuagauccaugggaucagcauccuguagugggagccagggaucuacc

SEQ ID NO: 4196250 - RNA, 77 nt, Human
ggcagauugggcuggugccuccaucucaguuagauugcuuucuugccucaugcagauuuggagguauuucugcugcc

SEQ ID NO: 4196251 - RNA, 106 nt, Human
ggcagauuucaaagguugcaaagcuuaaggccagacucuggaaugacaaauuccuauaugucaucuacccguuaggcuuuaagaaagccagcugacuagccugacc

SEQ ID NO: 4196252 - RNA, 83 nt, Human
ggcagcaacuauuugguaguccugauaagauuauaggaucauaaucuaggaaacaggauuauaaaaucuuaacaaguugagcu

SEQ ID NO: 4196253 - RNA, 61 nt, Human
ggcagcaacucauuauuccuguaaauuuccagguaaagaaaucaauggcuggguuguugcc

SEQ ID NO: 4196254 - RNA, 78 nt, Human
ggcagcacauuuuaacuaauguuuuucugaauguucuaauuccagauaaauucaaagcauuuaggacucaugucugcc

SEQ ID NO: 4196255 - RNA, 77 nt, Human
ggcagcacuuaacaaugaguccucugagguuagaggauuuccaggcucuguuagaggauuauuguucuauuuaugcu

SEQ ID NO: 4196256 - RNA, 63 nt, Human
ggcagcacuuggugccauugagugguugcagcucucagauggcucugagguguccaguuugcc

SEQ ID NO: 4196257 - RNA, 59 nt, Human
ggcagcagcucagucucucaguagguuaacaagaauuuacugaguaucaguuguaugcc

SEQ ID NO: 4196258 - RNA, 61 nt, Human
ggcagcaggauaugguggagagagcgagucuucugaguuaaauccuggcauucuugcagcc

SEQ ID NO: 4196259 - RNA, 73 nt, Human
ggcagcaggauggccaauugccaucaauuucugcagcaagucuggcaucauggcaucuuggcaucuugcugcu

SEQ ID NO: 4196260 - RNA, 70 nt, Human
ggcagcagguuguuuuguggccagguuuggcaaaguggcuuccuggcagcuagaaggcagccugucugcc

SEQ ID NO: 4196261 - RNA, 58 nt, Human
ggcagcaucucauaucuucaggucuggaucccugaggcacucacaucugggagcugcc

SEQ ID NO: 4196262 - RNA, 76 nt, Human
ggcagccaggcugaggggcgagggacccuguguccuggacaggcuccaugguucucccucagagccugggauggcc

SEQ ID NO: 4196263 - RNA, 55 nt, Human
ggcagccaugcacgcugccugggagaagacaacuccaggcagugcaucuucuguc

SEQ ID NO: 4196264 - RNA, 58 nt, Human
ggcagcccaggucuggcccagccuggccggaaugcccuggggcaagaucugggugacc

SEQ ID NO: 4196265 - RNA, 72 nt, Human
ggcagccccuuucuccugugaggucagaaguuguuagguuuagcugaagcugcagcaggaggaagggugguc

SEQ ID NO: 4196266 - RNA, 129 nt, Human
ggcagcccgcaaccaccuuuagcucugggccccccaggccagccuggagcauggcuggguggggccaccagcccaugcucucaggcgggccugugaucuuucccagggcacauggacuguaggcuggcc

SEQ ID NO: 4196267 - RNA, 65 nt, Human
ggcagcccucgcuagcucucccccaugcacauccugggguugagcucuccgggagggcacuggcc

SEQ ID NO: 4196268 - RNA, 64 nt, Human
ggcagccuccagggcacugguguuuucuuugcagaaggugauaauccaugagugucugaggccc

SEQ ID NO: 4196269 - RNA, 81 nt, Human
ggcagccuccccagacagcgggaggccugggaauuugggccuagaacaaagccucucugcugggagcacaaacaggcugcc

SEQ ID NO: 4196270 - RNA, 75 nt, Human
ggcagccuccuaguucucugccagucgcugaaggacacccaggacaguuauugagugcagagcagggcugcugcu

SEQ ID NO: 4196271 - RNA, 66 nt, Human
ggcagccuuagcaggucccugcagccuaagcgugcugucagggccacccucugcugggugcugacc

SEQ ID NO: 4196272 - RNA, 80 nt, Human
ggcagccuuucugguucucuggcagaggugcuguuuaaaugacauuuuucuugaagaucagagagcuguugagagcugcc

SEQ ID NO: 4196273 - RNA, 112 nt, Human
ggcagcggcagcagcagcagcagcagccucugcacgggcacggguggcguugguuuugugugucugcuguuuguuagggguccagccugucuguugcugcugucuguguguc

SEQ ID NO: 4196274 - RNA, 57 nt, Human
ggcagcguucccagcagaggaagcccaggaacuguggcagucucacuggagggcucc

SEQ ID NO: 4196275 - RNA, 63 nt, Human
ggcagcuagaauugugaugcugcacacaagcaucuagacagcacauaccacaauaucguugcc

SEQ ID NO: 4196276 - RNA, 129 nt, Human
ggcagcucaauuccaugacaagagcaauggggcuuggaauugagaaacuacagcuuaccucuaucaaguuacuuaaaaauucuaagccccaguuccuauuuuuguaaacuaaggacaacaagagcuacc

SEQ ID NO: 4196277 - RNA, 58 nt, Human
ggcagcucccagcaacucacugagaacuggaaaguuuccaggaaggguugggaggguc

SEQ ID NO: 4196278 - RNA, 70 nt, Human
ggcagcuccccucuguggggcaguaucugguccugugccccagcugccaaaggagagugggggccaugcc

SEQ ID NO: 4196279 - RNA, 61 nt, Human
ggcagcucccuauggugaggcgacaguaguuugguuccuucuuuuucagggauagcgugcc

SEQ ID NO: 4196280 - RNA, 58 nt, Human
ggcagcugagcgugaggaagaguuucagcuugaauucugacucgaccacucagccacc

SEQ ID NO: 4196281 - RNA, 58 nt, Human
ggcagcugccgugagcucacgccccgaaauagccccaggggccccagccgcagcugcc

SEQ ID NO: 4196282 - RNA, 106 nt, Human
ggcagcugcgauugugggaagcaguuccuugagaaugguugcuucagcacccaaggcugagaugguagcaggcacuucauaggguuccuucagauuugcagaagcu

SEQ ID NO: 4196283 - RNA, 61 nt, Human
ggcagcugggucacaccgaucuguguuugggaaagaccggaguuggauuguacuugcugcu

SEQ ID NO: 4196284 - RNA, 71 nt, Human
ggcagcugucucugaguuagcagcaucaggaagccuccccuggaagacacuggcugcaggaugaggcugcc

SEQ ID NO: 4196285 - RNA, 55 nt, Human
ggcagcuguggugcugagauaggagcuuggaaugcuccauggugccaagacuguc

SEQ ID NO: 4196286 - RNA, 59 nt, Human
ggcagcuucggacggcuuauaauugguuccaguuaaucucugccgcccugagaacugcc

SEQ ID NO: 4196287 - RNA, 69 nt, Human
ggcagcuucucggcugggaguauuugaauaugaguuaaaacuacaaaguaacuccucguuagaacuguu

SEQ ID NO: 4196288 - RNA, 93 nt, Human
ggcagcuugcugacaaugcagauucccaggccccagaccagcuguauccaaauuuaggugcugccuaggaaucuguauuuucaacaagucucc

SEQ ID NO: 4196289 - RNA, 58 nt, Human
ggcagcuuucaccugucuuccucagugaaaacucugugagggcagagcugggcuugcc

SEQ ID NO: 4196290 - RNA, 60 nt, Human
ggcagcuuucuguuuagucuggcagugaccaaacgggccugcaagaaucaggaagcugcc

SEQ ID NO: 4196291 - RNA, 69 nt, Human
ggcaggacuggcgugaagguggccaugaggaguuaacucugccuuauucuaugucuucugccaccugcc

SEQ ID NO: 4196292 - RNA, 56 nt, Human
ggcaggagaaaggucucuucuuuagagaagaggaagggaaagagacccauccuguc

SEQ ID NO: 4196293 - RNA, 57 nt, Human
ggcaggagaaucgcuggaagcaaggagguggagauugcagccagccgagaccaugcc

SEQ ID NO: 4196294 - RNA, 56 nt, Human
ggcaggagcucagguugguuccccacauuuucgggcuuacucugacguguccugcu

SEQ ID NO: 4196295 - RNA, 84 nt, Human
ggcaggaggagggggucucuuuaucagugaacacgggagcagcaugagaaguucaaagaauuuugagaccugacuccacuugcc

SEQ ID NO: 4196296 - RNA, 62 nt, Human
ggcaggagggcggacaaugacccggguuuuccaccgacuccagaugcgucccuccuccuacc

SEQ ID NO: 4196297 - RNA, 56 nt, Human
ggcaggaggugaguggcgggugagcgagcauugccaccugagcuccaccuccugcc

SEQ ID NO: 4196298 - RNA, 56 nt, Human
ggcaggcaagucugcucugugauuuucucuaccucugugagcacaugggccucguu

SEQ ID NO: 4196299 - RNA, 56 nt, Human
ggcaggcacauuugggggccgugagcaccucagcacacccucuugcagugucugcu

SEQ ID NO: 4196300 - RNA, 61 nt, Human
ggcaggcacugugauagauucugagaauacaaaacucaaugaauaagacacauugcuugcc

SEQ ID NO: 4196301 - RNA, 57 nt, Human
ggcaggcaggagcgugcuugggaccacugcuggcuccagacacugccuugcugugcu

SEQ ID NO: 4196302 - RNA, 62 nt, Human
ggcaggcccugcacagugguccuguguuuagucagcucaggcccagucugacaggggcuguc

SEQ ID NO: 4196303 - RNA, 78 nt, Human
ggcaggcgggcgagcugcaggcggggucgcagcggcuguuguugaagaggcgccagcacugcagcgccucgcauugcc

SEQ ID NO: 4196304 - RNA, 81 nt, Human
ggcaggcguugggacagcugugguagugagggccacuuuauucugugcuacaugaagagaggcugucugacaaagcuugcc

SEQ ID NO: 4196305 - RNA, 79 nt, Human
ggcaggcuccccaccgugaggccaagccuccucugccacugccagcauggcccaagggaggcuuggccuugggcuugcc

SEQ ID NO: 4196306 - RNA, 66 nt, Human
ggcaggcugucuaaaguuagagucaucugaacaaccacaggcauucuaauggcagagacuccuguc

SEQ ID NO: 4196307 - RNA, 55 nt, Human
ggcaggcuguucaccugcuuuugcaaauaaaguuuuauuggaacauagccaugcc

SEQ ID NO: 4196308 - RNA, 56 nt, Human
ggcagggaaacagcugaucccagacuagcuggugucagccuggugauuccucuguc

SEQ ID NO: 4196309 - RNA, 59 nt, Human
ggcagggacagaaaugguggcuaccauuccccacaggcagcucacaguucuguccuguc

SEQ ID NO: 4196310 - RNA, 69 nt, Human
ggagugagaauggcacaagaggucuggcuuucugacgauguaacugucucucuguguacagucucaccc

SEQ ID NO: 4196311 - RNA, 62 nt, Human
ggagugagcaaauagagauuugguccaaaaguucaagccaggaucucugucuugugugcuuu

SEQ ID NO: 4196312 - RNA, 58 nt, Human
ggagugaggaugucauggaccucacagaaggugacagugaggccucagccucagcucc

SEQ ID NO: 4196313 - RNA, 82 nt, Human
ggagugaggggcagcagggggucauucacgcuggcucugcucuguuagcugaaugacagccucucucucugagucucacucu

SEQ ID NO: 4196314 - RNA, 76 nt, Human
ggagugcaauggggcaauaucagcucaccgcaaccucugcuucccagguucgagcgauucuccugccucagccucc

SEQ ID NO: 4196315 - RNA, 89 nt, Human
ggagugccugugaggggccagcugccuguucugccaguuugccuagagggcugggacaggcuuggcccuguggauaagguucaaacucc

SEQ ID NO: 4196316 - RNA, 65 nt, Human
ggaguggcagagcugggauuuggggcaguuugcuuggccccaaagcccugcucuccuuccacucu

SEQ ID NO: 4196317 - RNA, 67 nt, Human
ggaguggcagcgaggaucagauuucuccagaaucacucggaguaauaucuauccucagcagccgccc

SEQ ID NO: 4196318 - RNA, 71 nt, Human
ggaguggcagggucuugcuguguugcccagggugggcuugaauuccugggcucaagugauccucccacuuu

SEQ ID NO: 4196319 - RNA, 57 nt, Human
ggaguggccucuccugugcaggguaagaaaggcauucauggaagggagugguccucc

SEQ ID NO: 4196320 - RNA, 66 nt, Human
ggauugccaucugguugauuucauuccgguuaguuuggccaaauaccauuaaccagaaaacaaucc

SEQ ID NO: 4196321 - RNA, 77 nt, Human
ggauugccgaugccugggcaccacucaaaccaauuaaaucauucuuacuggagguggggcccuggcacugguauuuu

SEQ ID NO: 4196322 - RNA, 57 nt, Human
ggauugcugguagucagugucccugggcugccaggcacacaggcauccaguauagcc

SEQ ID NO: 4196323 - RNA, 90 nt, Human
ggcccuuccagacuuugccacugaccuccaacccucgguuuauaggugccagggcuguagguaaggauggcaaaggaauaugaaggaguc

SEQ ID NO: 4196324 - RNA, 129 nt, Human
ggccgagcccguggccuggccgaggaggccgccgcucugcgaggggagcgcuguuuuccaggccggcgucuggaauguugcucugccuugcggugugagccgacuccugcccccauuucagcugcggcc

SEQ ID NO: 4196325 - RNA, 58 nt, Human
ggccgcaccugcauuccccucaaugggagcccgagagaaaggcuugcaggcuguggcu

SEQ ID NO: 4196326 - RNA, 55 nt, Human
ggccgcccccugugagcccgaucaugugcuuuuugggcuuaggucggaggcggcc

SEQ ID NO: 4196327 - RNA, 88 nt, Human
ggccgcgagcggcgugacagcugccagcucaccggcucagacggucgccgccgcguuugcgcagggggagcuggucgccgccgcggcc

SEQ ID NO: 4196328 - RNA, 65 nt, Human
ggccgcgguugaggaugccugggucggggaaggucgacgccggcccgcccggucgccuggcggcc

SEQ ID NO: 4196329 - RNA, 68 nt, Human
ggccgcuguggauggcaggacagacagaaggaacugcucgacuguccuccggccaccuacaguuggcc

SEQ ID NO: 4196330 - RNA, 94 nt, Human
ggccggaguaggcaaagcugccuucuaaauauuugucuggagauuagccuacuccugcagcucugagaagcaucuuugauuuacuuauacugcu

SEQ ID NO: 4196331 - RNA, 87 nt, Human
ggccggcaugaagacuacaggaggaugugcagccagggagaacgaagacaucuuggcauguucaucugcuugguacagauccugguc

SEQ ID NO: 4196332 - RNA, 85 nt, Human
ggccggcgugcuugucacggacugguccuagagucucuacuugaaaggccuuggcgaaaccagcucuggacaggcauuucccgcc

SEQ ID NO: 4196333 - RNA, 63 nt, Human
ggccgggggcggcggggugagggggggcagcagcucgccacucugauuggucaccucugcucc

SEQ ID NO: 4196334 - RNA, 80 nt, Human
ggccguccugggcccaggggcugccugguggcuucaaaaugcagccaguguggguugggccggguuggguccaggauguc

SEQ ID NO: 4196335 - RNA, 68 nt, Human
ggccgugcccugggggaguucagccgcacucaugagcaccuccccccgagcugccccugggcacugcc

SEQ ID NO: 4196336 - RNA, 104 nt, Human
ggccgugggcagcccggugcccgagauccaguggugguuugaagggcagggucccaacgacaccugcucccagcucugggacggcgcccggcuggaccgcgucc

SEQ ID NO: 4196337 - RNA, 97 nt, Human
ggccgugucccuagugacgcggugcggcaaguucauggggaugaugucugcaaagcgcugcaccucguggaucaccgcgucuguguaaggcauggcc

SEQ ID NO: 4196338 - RNA, 65 nt, Human
ggccguucaucagaggaguacacaggccugaaaugacaccugccugcguccucugagggcaggcu

SEQ ID NO: 4196339 - RNA, 76 nt, Human
ggccuaaccaagcaaacuuucauuguuaugugguuucuaggucuccuacagggcaaaaaguagugcugguuaggcc

SEQ ID NO: 4196340 - RNA, 78 nt, Human
ggccuaaccgcugguaucugugaaugugacauuaucugaagauaaggucuuugcaaaugcuagagauaaggugagguc

SEQ ID NO: 4196341 - RNA, 69 nt, Human
ggccuagacuaauauuuggaguuagugagauucucuauuucagaaggcucuggaauguguagucagguc

SEQ ID NO: 4196342 - RNA, 64 nt, Human
ggccuagcuguggaaaucaggcaaugagauggaagacucucagaggccuaugucuacaacugcc

SEQ ID NO: 4196343 - RNA, 61 nt, Human
ggccuaggaauccuuuuagaguugguaaaagacauggaccugacacaaaaggauucuugcu

SEQ ID NO: 4196344 - RNA, 57 nt, Human
ggccuaggaucuugaucuacuuaggaaaucugaguggcuccaauuugguccuauguc

SEQ ID NO: 4196345 - RNA, 107 nt, Human
ggccuaggcagcugugugugugcacgugugucguggaggccuacgcagcuguguguguguguuguggaggccuagguugaugugugugcacguguguuguagaggcc

SEQ ID NO: 4196346 - RNA, 59 nt, Human
ggccuagggaugaugucuaaaaucaugccacaagaugugguaacaucagaacccuggcu

SEQ ID NO: 4196347 - RNA, 121 nt, Human
ggccuagggcagcguggcuggcucccucacagguacugcuucuguucuuucaccuacgggccucuugguugccacagggaguuacagaagcacuucucagggacucuuugcuugccaggcc

SEQ ID NO: 4196348 - RNA, 99 nt, Human
ggccuaugaauaagcaaaagaccaaaaagccucuguuuuuccuuuuaaaauguggagauaauuaagacugcccauguuuuuauuuguuugacuagagcc

SEQ ID NO: 4196349 - RNA, 83 nt, Human
ggccuauggcuuuaacauccucuuuauggcuuccugugugucuagcacaguccuggccccaaggaaggauggcauucuagguc

SEQ ID NO: 4196350 - RNA, 67 nt, Human
ggccucaccacccucggugcgggguccugaugcccgcugggcccuccccucuggguggugagcagcc

SEQ ID NO: 4196351 - RNA, 67 nt, Human
ggccucagaccggagcuggccaguguccuucucaccacauuccacuggucagugcagucauggggcc

SEQ ID NO: 4196352 - RNA, 73 nt, Human
ggccucagcauucuguggucuucuauggagaaaggcuaauuuucugaaggcuuugaauggaaugaaaacugcc

SEQ ID NO: 4196353 - RNA, 71 nt, Human
ggccucagugggccgcugcaggggccccaugacugggcucuccaugccaaccuggguucucaucugaggcc

SEQ ID NO: 4196354 - RNA, 77 nt, Human
ggccucauuuaaaguguuggguguccaggacucagcagcauggcuuguguucaaucauuccaacacuuuaaaaugcc

SEQ ID NO: 4196355 - RNA, 55 nt, Human
ggccucauuuuuuguaaaugaccucugaguugaaagaaaguuucaaaaugaggcc

SEQ ID NO: 4196356 - RNA, 62 nt, Human
ggccuccaaccauagguccaggggcugagacaagguccuuuugagcuccuaugugggaggcu

SEQ ID NO: 4196357 - RNA, 71 nt, Human
ggccucccaaagugcugggauuacaggcgugcgccaccgcgccaggccgauccuugcacuuuucagagccc

SEQ ID NO: 4196358 - RNA, 67 nt, Human
ggccucccagcacuuggugguuuagccugaguuucuuacauggcagcuggaucccaaggcagagguu

SEQ ID NO: 4196359 - RNA, 77 nt, Human
ggccuccccugcaggcaugugauguuuggcuccagaggccuucuccucugggcuuuuccaugccugugaacugggcc

SEQ ID NO: 4196360 - RNA, 66 nt, Human
ggccucccgggaugcagaaggagccaugcuugcguggacagccugcgagaugucuucugcgaggcc

SEQ ID NO: 4196361 - RNA, 58 nt, Human
ggccucccugcucacacacccaggucacucucugggaaccagugcggcugggguggcc

SEQ ID NO: 4196362 - RNA, 65 nt, Human
ggccuccuagggcaucaggggcagccgaugugagcagcacugucugcccugagaugccagaggcc

SEQ ID NO: 4196363 - RNA, 55 nt, Human
ggccuccucucucuguccccccagugauggcacuggaagggcucugaggacggcu

SEQ ID NO: 4196364 - RNA, 56 nt, Human
ggccucucuccagucagugcagcccaguuguugugcggaugaggccuggaggggcu

SEQ ID NO: 4196365 - RNA, 56 nt, Human
ggccucucugagagcagacguuggccucugugccucucugcuucuccuagaaggcc

SEQ ID NO: 4196366 - RNA, 121 nt, Human
ggccucugacccauuuuucuagcggacucauuaccucuuauuuagccuugaagacucugguggcugauuggcagagaagcuuucacagcugggaagagauaugggaucugggucagcugcc

SEQ ID NO: 4196367 - RNA, 129 nt, Human
ggccucugccagcccuugcagcugcagcccaucccugggccauguccccuccaucgagugcccggugcuugggggaggagggcagggacagggagggagccacagucagugcccgggaaccuggaagcu

SEQ ID NO: 4196368 - RNA, 79 nt, Human
ggccucugcuaucacccuacauaagaaauaauuccaaaaggauuauagaucuaaaugugaaggguugaaccagagagcu

SEQ ID NO: 4196369 - RNA, 90 nt, Human
ggccucuguaggggccugugucugugccuguccugcucggcacauagaggaaagccagggccggggcaggcaggggucucuggcugggcc

SEQ ID NO: 4196370 - RNA, 60 nt, Human
ggccugaaggugcaguggcuggaggcuguugccaguucucagaauugcaccucaacugcc

SEQ ID NO: 4196371 - RNA, 57 nt, Human
ggccugaaugccugagugugggcuuuccaaauugaguucucacuggcacaucaggcu

SEQ ID NO: 4196372 - RNA, 71 nt, Human
ggccugaauggguuugugcaggagggggcugccuugaagugguccccucccuuccaacagagcuugaggcc

SEQ ID NO: 4196373 - RNA, 62 nt, Human
ggccugacccugccgagcugcuccgggaaguguuugcuggaagcucaaggcagggugagccc

SEQ ID NO: 4196374 - RNA, 68 nt, Human
ggccugagaauaauucuccauagcccucagcuucaccaucugggcucuggguuuguuguucuuuuucc

SEQ ID NO: 4196375 - RNA, 59 nt, Human
ggccugagggugggcucucaguggcccuguugcuauccuguggccccacccucuuggcc

SEQ ID NO: 4196376 - RNA, 57 nt, Human
ggccugauucugcagccuggugggcagaggagacuggcaggaggcaaggucaagguc

SEQ ID NO: 4196377 - RNA, 70 nt, Human
ggccugcagcccuugguauuuuccgaucccagcugcucugugaggguggaaaguauuuggggaccaggcu

SEQ ID NO: 4196378 - RNA, 76 nt, Human
ggccugccagaggaggccggccuugaagcuucuuuuaggaaaaaggcccugaagucggccccucaccccggaagcc

SEQ ID NO: 4196379 - RNA, 81 nt, Human
ggccugccccugcccuacucugucccccccaugcccacggcagacaggcagugggcaagcaggagggccucagggcagguc

SEQ ID NO: 4196380 - RNA, 113 nt, Human
ggccugccccuugggaggaugcagaguggaugaaauugggggcugaugaguuccccucauagacaaucccccauccuaccucaucccuaguccuggauaucuggggccaggcc

SEQ ID NO: 4196381 - RNA, 72 nt, Human
ggccugccuaccugggcccaccagugccuggcccagaggagaggaacagagcugggcuucaggccugcagcc

SEQ ID NO: 4196382 - RNA, 121 nt, Human
ggccugccugccccuguggggugcuguggggugcuagccugggacccagaggccccuuggcauuugcuggcagccucccagcugcauuccucagcauggagcccgagggagagaggaggcc

SEQ ID NO: 4196383 - RNA, 91 nt, Human
ggccugcgcaccuguuccccagggcccaagccgccuuccagagacccauagguuugggaagcaggggcuuggucaccggggugcgcagguc

SEQ ID NO: 4196384 - RNA, 58 nt, Human
ggccugcuuugagaugggcagcagcuacuccagggugcguugaccugcagagcaggcc

SEQ ID NO: 4196385 - RNA, 68 nt, Human
ggccuggagcugggcuaggguaggaguccccugugaggcuccaccucugccucuccagcuccuuggcc

SEQ ID NO: 4196386 - RNA, 65 nt, Human
ggccuggccauagggcccaggaaaaugcagguaucauuaacagccuggagcacuguggccugucc

SEQ ID NO: 4196387 - RNA, 68 nt, Human
ggccuggcccagugcuguucacccagugcuguaauugcacugugauuaccugcacuggcccuccugcc

SEQ ID NO: 4196388 - RNA, 62 nt, Human
ggccuggcugcuuagccuacuucccuugggccucugugggccugggcggccauguguaggcc

SEQ ID NO: 4196389 - RNA, 63 nt, Human
ggccuggcuguuucaggcagugucccucucuccaggcuuggugggcaggcugagaugccagcc

SEQ ID NO: 4196390 - RNA, 73 nt, Human
ggccuggcuuugaaaugcauuucagucucucaacacagacugcuuucauugcauuuagagucccacuaaggcc

SEQ ID NO: 4196391 - RNA, 124 nt, Human
ggccugggaccuagguucaaauccuggcaucaccaccuacaucuguguggccuccauaggguacuuugguaauaauaaauauucaaugaggucauauaagcuaguguuggcagaggcccagccc

SEQ ID NO: 4196392 - RNA, 94 nt, Human
ggauugcuugagguuaggaguuugaggcuuugguucacuauaaucaugccuguauauggccacuguccucuagcccagacaacauagcaagacc

SEQ ID NO: 4196393 - RNA, 79 nt, Human
ggauuggggccugguuguugcuuucgagggugugggaagaggacacaucacagugauaacuaaguccugcaugcagucc

SEQ ID NO: 4196394 - RNA, 57 nt, Human
ggccugugggaggacagcuggggccggcuccaggcccccugguccccacacagagcc

SEQ ID NO: 4196395 - RNA, 70 nt, Human
ggccugugucucccccagcuacucugagugucugaacacucaucuucccuccuggagggaggcuuaggcc

SEQ ID NO: 4196396 - RNA, 67 nt, Human
ggccuguguuuuuaacucuaggagucaugaucugaaugugaaauuccaagggcuacaaacacagacc

SEQ ID NO: 4196397 - RNA, 65 nt, Human
ggccuuauugacugucauucuccaugcuugaguaagcauuagcucaugccuuugauagucaggcu

SEQ ID NO: 4196398 - RNA, 61 nt, Human
ggccuucagcgccuucaccaccagcgccuuggccagaugcuggccggccaggugcugagcc

SEQ ID NO: 4196399 - RNA, 81 nt, Human
ggccuuccaggcgcaugcucccaucugcguuaucugccucagaucaaaagagaaaaugcaugagaaugugcucggaaggcc

SEQ ID NO: 4196400 - RNA, 60 nt, Human
ggccuucugaagcaucuaggagaaaauccaucuccuugauuuuuccagcuucuagaggcc

SEQ ID NO: 4196401 - RNA, 61 nt, Human
ggccuucuggaguggagcugaucauuuuaauaugcuaauauaucaucaccauuuugaggcc

SEQ ID NO: 4196402 - RNA, 61 nt, Human
ggccuugagagccagugcaggcccaggagagcugagagucaccugugcugcccucggggcc

SEQ ID NO: 4196403 - RNA, 130 nt, Human
ggccuugaggucacaaaaugaauaaugauccuuacauuccugcaucugcuuuuggggcucgcccuguuaaaaccacaggugaggacaacaugggaagauuuauaguucucagccuguguaccuaccugcc

SEQ ID NO: 4196404 - RNA, 100 nt, Human
ggccuugaugccuccuugccugacuggugggaagauggaaaacauuuuugcagcucaagagguugguucuggcccccacauucaauggggcucuagggcc

SEQ ID NO: 4196405 - RNA, 55 nt, Human
ggccuugcagccacagaacacagcaagugcuaaggcccugaggcuggcaggagcc

SEQ ID NO: 4196406 - RNA, 85 nt, Human
ggccuuggaagcagguacauucguagacccauuuugcagacaaggaaaguacagugcaacuagaugauguagcuuguccaagguc

SEQ ID NO: 4196407 - RNA, 56 nt, Human
ggccuugggcagacacgucacacacuuuacuggaucaaacggugucagccuuggcc

SEQ ID NO: 4196408 - RNA, 64 nt, Human
ggccuugggcuggcugcaguaucaggcccugcuggcacacagcugcaacuggccaggccaggcc

SEQ ID NO: 4196409 - RNA, 67 nt, Human
ggccuugguuccaaagcaggcaucuaaaggguucccugggcuggcuaaaggcuuuggagcugaggcu

SEQ ID NO: 4196410 - RNA, 55 nt, Human
ggccuuguguggcucucagcugccccuccucugagcagcuggagccaagagggcc

SEQ ID NO: 4196411 - RNA, 61 nt, Human
ggccuuguguucccuucuccucugcuuauuuucaugagccagcaggugggaaacuggagcc

SEQ ID NO: 4196412 - RNA, 65 nt, Human
ggccuuuaagcaauugaaaagaaauaucuggcacaagcucugagaaacuuauuguuuaaauggcc

SEQ ID NO: 4196413 - RNA, 66 nt, Human
ggccuuucaguuccaucaaaggaagauaaguccccacucauugucccuggaggaaacugugagguc

SEQ ID NO: 4196414 - RNA, 56 nt, Human
ggccuuugcccgugggccuugcacucuccgugacaaggcgacacaggcagcaggcc

SEQ ID NO: 4196415 - RNA, 60 nt, Human
ggcgaaggagcuggcagggcuuccagguucacuguggagcagcuggggugcucuuuuguc

SEQ ID NO: 4196416 - RNA, 58 nt, Human
ggcgacgcauguauugggauuaacauguaauaaacuuccuuaauccauaugcuuugcc

SEQ ID NO: 4196417 - RNA, 75 nt, Human
ggcgagaaaaggagggauaagaaccauccuaaagcuguaggacuggaagggauuuuagugacuccuuuaucugcc

SEQ ID NO: 4196418 - RNA, 73 nt, Human
ggcgaggccgaggcggcugaggcugcuuuagcuccugcuccgggcuggagcugccagggcugccgccgccgcc

SEQ ID NO: 4196419 - RNA, 59 nt, Human
ggcgaugcucagauuuuugaccuguuuuccaacucugaggucaaacuacuggcagugcc

SEQ ID NO: 4196420 - RNA, 58 nt, Human
ggcgauuuugacauugcggcauugcucagcauggcgggcugugcuuuguuagguuguc

SEQ ID NO: 4196421 - RNA, 112 nt, Human
ggcgcacgcugugcuaggccccggcagcccuggcgcccccagaucucccagaggagagggagcugccaggcgccacggcuucccuggggcucugagcgcuuuggcgagcguc

SEQ ID NO: 4196422 - RNA, 71 nt, Human
ggcgcaggcagcucuaauggaaagugccgucaccaaagagcaaagcauuauuuaugacugucuguaaugcc

SEQ ID NO: 4196423 - RNA, 86 nt, Human
ggcgcaggcuucagaauuaaugucacaucugggauggcccugauguggucagaggcacaacagucccauuguguuugacuuguguu

SEQ ID NO: 4196424 - RNA, 58 nt, Human
ggcgcagguguucucagaggaggcuuggaagagcugacuuuaaagggacaccuaugcc

SEQ ID NO: 4196425 - RNA, 60 nt, Human
ggcgcaguguucgcccucucgccacgaaguaaacaagugggagggucugagagcugcacc

SEQ ID NO: 4196426 - RNA, 59 nt, Human
ggcgcccagggcaggaggccgcucagagcgcagcagcaggaguggaagcucggggcgcu

SEQ ID NO: 4196427 - RNA, 62 nt, Human
ggcgccuggcugcuagccagaggcagcguucgaaauacaacugccucggcggcggcggcgcc

SEQ ID NO: 4196428 - RNA, 86 nt, Human
ggcgcgccagcagcgcgggccaggcgcagaagcgcagcaccagcaggcugcgcgccagcucccagguucgccagcugcaguacgcc

SEQ ID NO: 4196429 - RNA, 57 nt, Human
ggcgcgccguggacagcccuggcgccgcaggggccuggggcucaagauggcgccgcu

SEQ ID NO: 4196430 - RNA, 59 nt, Human
ggcgcgcggagcgggcgcgccgccaacgcggucacgugcgcggccccuccucucgcgcc

SEQ ID NO: 4196431 - RNA, 60 nt, Human
ggcgcgggagcagcucgcuaggcacugccacaugcagcugacuguccgcugcucccggcu

SEQ ID NO: 4196432 - RNA, 94 nt, Human
ggcgcgggccuacagcucacucacagggcuaguuagcaugcgcccaacgcagccuucuccguugcuggccuuugaggaagcugcgggucuugcc

SEQ ID NO: 4196433 - RNA, 74 nt, Human
ggcgcucggaaccgaccugggagcuggcgggaccguccucccccgccacgcccucccaucgggcuuugggcgcc

SEQ ID NO: 4196434 - RNA, 62 nt, Human
ggcgcuguguuguugcccucugguccccaaagagauuaucgagggcugcugccagauaugcc

SEQ ID NO: 4196435 - RNA, 62 nt, Human
ggcgcuugaacaggguugggugagagaggaagucccuuacaguaugacacuguccagaagcu

SEQ ID NO: 4196436 - RNA, 130 nt, Human
ggcggaccugggagggcgguuugcuuuucuuuggagcgcgagacaggccucccauccggagccccagcucgcugggggcucacucggcugggauuggccugauuccccuccccugccugcccuccacccc

SEQ ID NO: 4196437 - RNA, 56 nt, Human
ggcggacgcgcacggccggcuuggcccgggccucgggcgcgccgucggguccagcc

SEQ ID NO: 4196438 - RNA, 70 nt, Human
ggcggagcucaguggggggacugugggaagaagaugcacccgcagacaccgcaccuccccugggccugcc

SEQ ID NO: 4196439 - RNA, 76 nt, Human
ggcggaggguugggggaguacugguggccucgguguccccuggaggccuggugugucucccgcuuccucucacgcc

SEQ ID NO: 4196440 - RNA, 72 nt, Human
ggcggagguccgcggccccccuucagccucgagguguccccagggggcugggaggccgugcugaccuuugcc

SEQ ID NO: 4196441 - RNA, 63 nt, Human
ggcggccccuaauugguugguuagcugaaagucaagggauggcaguugcccagccaauccgcc

SEQ ID NO: 4196442 - RNA, 70 nt, Human
ggcggcgguucugggaagagcaccaggcugcuccaggcaggaaagggcucugaaucccaggucugccucc

SEQ ID NO: 4196443 - RNA, 129 nt, Human
ggcggcugggggccgccaggaccuggggucuguccguaguaagcggccugcugucuguaauauuccgcccaggcggcacuguagucuggcugggagccugggggagcuccuggacccccuccgguggcc

SEQ ID NO: 4196444 - RNA, 80 nt, Human
ggcggggaggcgggagcaggagcccgcggccggccagccgaagaugguggcggcuacuccuccuggugagucugcccgcc

SEQ ID NO: 4196445 - RNA, 79 nt, Human
ggcgggggccacguggcccugccccgccccugcuggcuucgguuccugagcagagcugcaguggccugcuuuccccgcc

SEQ ID NO: 4196446 - RNA, 83 nt, Human
ggcgggggccgggcuggggcgcgggcagggggcgucgggcgaccgugcaccccggggcccugcuccucgccccuucccccacc

SEQ ID NO: 4196447 - RNA, 86 nt, Human
ggcgggggcuggccgcgcgucgggcgccaggcccggggcugugggcaccgugcccagccccuggcgcacgccgagccgccgccgcc

SEQ ID NO: 4196448 - RNA, 95 nt, Human
ggcgggggguuccuugagcccaggaaguggaggcugacuugagccgugaucacaucacugcacuccagccugggugacagagcgagauccccucc

SEQ ID NO: 4196449 - RNA, 70 nt, Human
ggcggguggcuaggcccaacggcaggaagccgacgcuauccuccguuccgcggcgccggguccgccuucc

SEQ ID NO: 4196450 - RNA, 67 nt, Human
ggcgggugggugguccgcagacauauggcacgaauucagcacauguucugagguccaccgacuuucc

SEQ ID NO: 4196451 - RNA, 108 nt, Human
ggcgguacuugagggguuagccacgggugccagaaauucuccaggcuggcgggcagggggguccuugcuguugugggagacuggggccugugugcccccaggaccacc

SEQ ID NO: 4196452 - RNA, 122 nt, Human
ggacucaguucucauuuuccucccguuuucucuggauuguggcuauuguucucugguugcuagaucaagcuggagcacaguaaagcagugucacaaagcuggaaggggucugggaugagucc

SEQ ID NO: 4196453 - RNA, 55 nt, Human
ggacuccagccuuugaguccuugggaacccagaaggaccugagaguuggaaaucc

SEQ ID NO: 4196454 - RNA, 85 nt, Human
ggacucugacucagccaaggcccagccccucuuagcuuccucaucugcuaaaaggaagagcuggaccagaggacugguuuggucc

SEQ ID NO: 4196455 - RNA, 80 nt, Human
ggacucugagaauauaagacuauuucuguucauaaggaguuauuuuuuccccaagaaaagucuuuuccuaggguaacccc

SEQ ID NO: 4196456 - RNA, 59 nt, Human
ggacucugccagguggcuucugcucagggucuccuguugagugcagcaagguagagucu

SEQ ID NO: 4196457 - RNA, 88 nt, Human
ggacucugguacuguggcuguagaagaaaaaucuccuuuacuuauuuuaguauccagguuccucuucauguucaacaguaaggacucc

SEQ ID NO: 4196458 - RNA, 71 nt, Human
ggacucugucgggauucaguccaagcgggggcgaccuuggccucugccuccugcuugucccgacgcauucc

SEQ ID NO: 4196459 - RNA, 69 nt, Human
ggacucuuauaaagaugucucuguugcggggggucucuuaccuggaaugggauaggucuucaggaauuc

SEQ ID NO: 4196460 - RNA, 102 nt, Human
ggacugaaaacacaccuucaaugaaaauaauagucaauggaauaggguaaauauuaauaucuacaggauuauuaugaguuauuaaggugaguauggcagucu

SEQ ID NO: 4196461 - RNA, 79 nt, Human
ggacugaaugacuucuucagauacuuugcaaggcaugacuguauauaaggcaaguauucuguaaaaagucaacuagucu

SEQ ID NO: 4196462 - RNA, 68 nt, Human
ggacugacucuucuguaaauucagaaaugucuccaugcucugauguuucucauccagagagucagucc

SEQ ID NO: 4196463 - RNA, 75 nt, Human
ggacugaugucagccuuugguuaucuuggacaugaaggauuacaauagcugagucaucaaaggcugauucagucc

SEQ ID NO: 4196464 - RNA, 57 nt, Human
ggacugcagaauaauuuaagcuuuucaucugaguuagaaucuguauuucugcaguuc

SEQ ID NO: 4196465 - RNA, 74 nt, Human
ggacugcugugucucccaaggagggucacugggucaaagaggcccccuggagccuugugagaccacaauagucu

SEQ ID NO: 4196466 - RNA, 119 nt, Human
ggacugucuuacaggcuuuuggaguuggccugggaagagggcauggugggccuugguuagacugccauuuccacacuugcugucugcugaggauggcuccucucuaugcuggauggacc

SEQ ID NO: 4196467 - RNA, 58 nt, Human
ggacuguggugcuaaaaggagacugacacagacuagucuuggaaguagaacacagucu

SEQ ID NO: 4196468 - RNA, 66 nt, Human
ggacugugugggugucuuucaguauucucuuucuacuucugcugcagcugcaaaaacauacaguuc

SEQ ID NO: 4196469 - RNA, 61 nt, Human
ggcugcaguaauagcagagucuuccaugcaaccaugcagauaauuuagcuguucuguggcc

SEQ ID NO: 4196470 - RNA, 61 nt, Human
ggcugcaguagagcccucacugggaguuucuuccagugcaccaagaggccuagacucagcc

SEQ ID NO: 4196471 - RNA, 64 nt, Human
ggcugcauaguguaagaauguaucaugccuacaauggucuucaucuucaguacacuugcacgcc

SEQ ID NO: 4196472 - RNA, 70 nt, Human
ggcugccacccaggacacggcagagauaagcgcaggugaguguggccaugccugucuuggaguccuggcc

SEQ ID NO: 4196473 - RNA, 127 nt, Human
ggcugccagaguggggaauagguaaugacuguuuuauggguauaggguuuuauuuuggagugacuaaaauuuuuuuggaaagacauagaauuuguacuuguagaacauugcaaauauacuaaaugcc

SEQ ID NO: 4196474 - RNA, 60 nt, Human
ggcugccaguuccuucuuacuccagcccaagucaggaaaaucaagcaaggaacugcuacc

SEQ ID NO: 4196475 - RNA, 86 nt, Human
ggcugcccagucuggucaugucagcuguugaugugcagggagccccugcugcacagcccgcuggcccagagaucaugcagguaguc

SEQ ID NO: 4196476 - RNA, 69 nt, Human
ggcugcccugacugaccuuuugaauaugagucucagagauaaguuuucaagcagcucagggacacaguu

SEQ ID NO: 4196477 - RNA, 64 nt, Human
ggcugcccugauaugauuuagaacaugaacaccaugaccuaaauguucucagaggguaauaguc

SEQ ID NO: 4196478 - RNA, 77 nt, Human
ggcugccgaggaugggaaaucagggugaaaguugaggcugagcugcaagauuugguuuucuauccucugcaauggcc

SEQ ID NO: 4196479 - RNA, 73 nt, Human
ggcugccugaguggaggucgagggaaagucacugccugcaucggcuguccccuccuuccccuucaaggcugcc

SEQ ID NO: 4196480 - RNA, 58 nt, Human
ggcugccugcuccuccugcacggggcgaaaagcccaccugggauccgagcgggcggcc

SEQ ID NO: 4196481 - RNA, 59 nt, Human
ggcugcgaccgcccccgaaccgcgucuacgagccuugcgggcuccgggucuuugcaguc

SEQ ID NO: 4196482 - RNA, 129 nt, Human
ggcugcguuccccgcaccucaagaggucugagcucgccccacugucugcucgggguucccaccuggcccgggccaggaggagcaucgggcaggaggcgggucucagggccgggcagucugggugugccc

SEQ ID NO: 4196483 - RNA, 78 nt, Human
ggcugcuacuaguccuguguguggccuuucccagcguguucuuaccugugggccaugaucauagugcugggccgagcc

SEQ ID NO: 4196484 - RNA, 60 nt, Human
ggcugcucacgcagcccucccuguggccuguucuccaggagauggggcugagugacagcc

SEQ ID NO: 4196485 - RNA, 59 nt, Human
ggcugcugcuguguaggccuguuuccugucaccaggguucagagccaagagcagcaucu

SEQ ID NO: 4196486 - RNA, 86 nt, Human
ggcugcugcuugcuggacacacuggagucuggcagggucagcugagcagcucuugucuccucggcuguccagccagccuggcagcc

SEQ ID NO: 4196487 - RNA, 56 nt, Human
ggcugcuguacugaugucaguuuuuauuuauugagugcuuagcaggcauaguagcu

SEQ ID NO: 4196488 - RNA, 120 nt, Human
ggcugcuguggaaaccuuaagagacugcgcccccuggugucagaacgcugucauugcagcaugggacuuccagccuggggaggcagcuucucaccugcagacgagggcuccacccuagcc

SEQ ID NO: 4196489 - RNA, 77 nt, Human
ggcuggaauacaagacucagcacagacggccugaaacccagccugaggugguagcugggguuuguggcgucacagcc

SEQ ID NO: 4196490 - RNA, 130 nt, Human
ggcuggaaucucaugccucuggcuuuauuggucugggaucucuggggcauccccaucccuaaaccuccaauggacuuugcccuaaugaggucucuuugcaguggcccugacccugugauuguucucugcc

SEQ ID NO: 4196491 - RNA, 80 nt, Human
ggcuggacaguggugggugggggucaagcuggaagguuccauggggcuuucaaacuccagcucaccaaucaaguggggcu

SEQ ID NO: 4196492 - RNA, 91 nt, Human
ggcuggaccugaccgaugcccuuucaucauugcacugcuucccagcggccuauaguagugcaacagggaaagagugucgggcaggccugcc

SEQ ID NO: 4196493 - RNA, 56 nt, Human
ggcuggagggagagugaagagggaagagaauacaguccuugcuauuuuccucagcu

SEQ ID NO: 4196494 - RNA, 56 nt, Human
ggcuggagugcaauggcacgagccucugccucccggguucaagccauucuccugcc

SEQ ID NO: 4196495 - RNA, 77 nt, Human
ggcuggagugcaauggcaugaucugggcucacugcaaccugugccuuccagguucaagcgauuguccugccucagcc

SEQ ID NO: 4196496 - RNA, 77 nt, Human
ggcuggagugcaguggcaugaugugggcucauggcaaccucugccuccugggcucaagugauccucucaccucagcc

SEQ ID NO: 4196497 - RNA, 126 nt, Human
ggcuggagugcagugguggaucacaacucacuguaaccucaaacucuugggcuuaaggaauccucccuccucagccuccgaaagugcugggauuacaugugccacccugccuggucacucuuagcu

SEQ ID NO: 4196498 - RNA, 62 nt, Human
ggcuggcaccugcccuccgcuggucauucaggaacugcgggggcuccuggugcucaagcgcc

SEQ ID NO: 4196499 - RNA, 61 nt, Human
ggcuggcagcaugucccggccucagugccucugcugugaacuggcacaggcugccccugcc

SEQ ID NO: 4196500 - RNA, 69 nt, Human
ggcuggcagcucacugauuagcaauuauuuucccagaaaguugguagaagcgguggugucugcugagcc

SEQ ID NO: 4196501 - RNA, 62 nt, Human
ggcuggcaucacuggcuucgguguauuauuaucuuggugccugguucuaaugaaugccauuc

SEQ ID NO: 4196502 - RNA, 82 nt, Human
ggcuggcaugagcacgaagugguacccauaggccacucacaucuggaaggcugcaaugguaccaccaauucagcugccagcu

SEQ ID NO: 4196503 - RNA, 92 nt, Human
ggcuggcgcggccugugcuggcgggaaucguagcuaccaucugcuucuuggcagcugccauccuguucagcacccuggcugccugcuuuguc

SEQ ID NO: 4196504 - RNA, 73 nt, Human
ggcuggcucagggggauuagcaauuaucugaacucacacuuagaaauccuugaccuguuccccuugguccauc

SEQ ID NO: 4196505 - RNA, 124 nt, Human
ggcuggcugucacauccccacuggacaaaugaauuacauguaagaucaaagccagugaggagugagguuauuggccugcauuggcuuuggugugugugugugucugugugugugucuguguguc

SEQ ID NO: 4196506 - RNA, 62 nt, Human
ggcuggcugugcccuguacucugggggugcccgggugggucugguggaggguggagugggcc

SEQ ID NO: 4196507 - RNA, 56 nt, Human
ggcuggcuuggugagcugucacuucucuccugaagccuucccacucccaguuagcc

SEQ ID NO: 4196508 - RNA, 56 nt, Human
ggcugggacggcucaguaagaagggucugggcucucucccugcccugucccaugcc

SEQ ID NO: 4196509 - RNA, 88 nt, Human
ggcugggacugaggucauguucugucagguuccaaagagcgccaggaagacucugagaccacagagcacggccugcuuucucccagcc

SEQ ID NO: 4196510 - RNA, 57 nt, Human
ggcugggaggggagcggggcugugagcaggagcuaauggccgccuguccuucccgcc

SEQ ID NO: 4196511 - RNA, 56 nt, Human
ggcugggaguguuugcaccaagaaaaauccaucucuuagcaaacauucuuccaguc

SEQ ID NO: 4196512 - RNA, 93 nt, Human
ggcugggcagaaggcgggugugggacgggugaguggccagcuaaaagugauuggcagcugccauguccacgugcuccgagcuuggaaccagcu

SEQ ID NO: 4196513 - RNA, 90 nt, Human
ggcugggcuccuaucugugccuccguaacacaccaggcccacuuucucucccugguuccuggggaggcacagagaagagugugaccaguu

SEQ ID NO: 4196514 - RNA, 66 nt, Human
ggcugggcucuuggaccccaacgcuggcccccaguuccugccagccaccuucuccaaggccuagcu

SEQ ID NO: 4196515 - RNA, 72 nt, Human
ggcuggggacacagagccaaaccauaucacccugcaaauccaagggggcacuccucugguccagccccagcu

SEQ ID NO: 4196516 - RNA, 83 nt, Human
ggcuggggcugcgggguugggacugucaucuggaggcucagaaacgcugcccuccauugucugggaccccagcagccccagcc

SEQ ID NO: 4196517 - RNA, 84 nt, Human
ggcugggguuugaguuuuggcuuuguugcuuguguacuucaguuaggauuucuuaguugcaagcagcccagaacagcucuggcc

SEQ ID NO: 4196518 - RNA, 126 nt, Human
ggcuggguauugaggacacuggggacucuggacuggucuccuggguggcugccugccuuucugugcagaaggcuggcucagcuuuccagcccuggcuucuuagcuccccacuguuccuccucagcc

SEQ ID NO: 4196519 - RNA, 76 nt, Human
ggcuggguauuugaaggagaauuaauaggcauuggaauugaacauugccccuauauaauuuucuuuagaucuagcc

SEQ ID NO: 4196520 - RNA, 90 nt, Human
ggcugggugcaggaagaggggguggagcuaaaugucuacuggcuggguggguugcagaggguauggcuucaccuucauugguacccagcu

SEQ ID NO: 4196521 - RNA, 76 nt, Human
ggcuggguuccuccuggaggcucuagggaaaaaucgaauuucuuguauuuuccaccuucuggaggcuacccauguu

SEQ ID NO: 4196522 - RNA, 75 nt, Human
ggcugguagcaggacagggauucaaacucccaacugucugagugggccugggcuccuguccucuugcuaccuguc

SEQ ID NO: 4196523 - RNA, 79 nt, Human
ggcugguuaguugaggaggacuuagcugggaugguuugucucugcuccaugugaucucuccuccuccacuaggcuagcc

SEQ ID NO: 4196524 - RNA, 67 nt, Human
ggcugguuaucccacuucccugacauauguauuucuucaaagggagcucauaacaagguagccagcu

SEQ ID NO: 4196525 - RNA, 62 nt, Human
ggcugguucugcccuggacagccuuggccaaagcagagagagggucccugggcagaggcacc

SEQ ID NO: 4196526 - RNA, 86 nt, Human
ggcugguuuagacauuucugguuauugacaggccuuacugcggcuucccccaaaugaaugaggaauauauuuuucuaaauccagcc

SEQ ID NO: 4196527 - RNA, 61 nt, Human
ggcuguaccugccucuccucuacacuggaggaacccagcacagagaggccuggugacagcc

SEQ ID NO: 4196528 - RNA, 59 nt, Human
ggcuguaguugaugauuucugauauucuaaagaguguuaagaugcauuaccugcaagcc

SEQ ID NO: 4196529 - RNA, 57 nt, Human
ggcuguauugugucaccuauggaucugcccagagcccagugcauaaucaauacagcc

SEQ ID NO: 4196530 - RNA, 76 nt, Human
ggcugucagaaaguguggggguacaggugggcgugugcaguagucaugcccugugccagucacgcuguguugugcc

SEQ ID NO: 4196531 - RNA, 115 nt, Human
ggagcuuaagucauuauuucucacucuuuuuagaugccgcagaagaucuaacucuuaaccuggaccuauucaaagauagauguugagaaauacagaucaauggcucaaaagcuuc

SEQ ID NO: 4196532 - RNA, 60 nt, Human
ggagcuugccuaagguccuucaguaagucaguggcaaagcuggagccacagucagguucc

SEQ ID NO: 4196533 - RNA, 80 nt, Human
ggaggaaaggcagugguuggguggaggaggggaugacuguuuugcucagagccuccuucaguucaauuaguccgucuucc

SEQ ID NO: 4196534 - RNA, 103 nt, Human
ggaggaagaaaaaggaagugcucagggagcauagugaauuuaccugcucgugagcaauaaaucuuacuuaugauuuuucgguguuaucuguuuuucuucuuuu

SEQ ID NO: 4196535 - RNA, 57 nt, Human
ggaggaagcccucggugccccacaugugcuaagagggcagcagugagggcauccucc

SEQ ID NO: 4196536 - RNA, 114 nt, Human
ggaggaauaauaucuagccacuugguuaaaauuucaagugugcaaaauuucccacuguggaacugggaaauguuggacacuugaaauuuuaaccuauuggcuagacauucuucu

SEQ ID NO: 4196537 - RNA, 65 nt, Human
ggaggaccugccugcuggcuccacagaucagacucccagacuugaccagcugcuugcaggccuuc

SEQ ID NO: 4196538 - RNA, 69 nt, Human
ggaggacggugaguucugugaagguaaggcagaaacugcuuuaacacaucccugcucuacccguucgcc

SEQ ID NO: 4196539 - RNA, 107 nt, Human
ggaggacggugccaggugucugcaggcccugggcaggaucagccaguauccagcuggacuagaaccaagagcccuugggcgcuggagcugcuugggccugugccucc

SEQ ID NO: 4196540 - RNA, 63 nt, Human
ggaggacugaacagauguggagguaccuuguacacagcaggcacucagaguuaguucuccucc

SEQ ID NO: 4196541 - RNA, 66 nt, Human
ggaggagacuauccccuuuguucuaugaguugcuucuaaaguaggagccaaaggaaguuucccucc

SEQ ID NO: 4196542 - RNA, 77 nt, Human
ggccugaggccccccaggguuaacauguggucacggcauucuguggcagcacaagguggcccauggugggagaggcc

SEQ ID NO: 4196543 - RNA, 84 nt, Human
ggccugaggucugagaugcccuguggcaguacauauuuggguccuauccagguggcaguuacaggggcaaauuaugucauggcc

SEQ ID NO: 4196544 - RNA, 91 nt, Human
ggccugagucucucuagucuuuggggcauggccaguccuucauuuccugggcaggaacuguucccucacaggcuggagaccuuacagugcc

SEQ ID NO: 4196545 - RNA, 55 nt, Human
ggccugauucaugccaugcaguggguacacguccacagccugucaucucaugguc

SEQ ID NO: 4196546 - RNA, 56 nt, Human
ggccugcagcugcuuccacacaccuacugcaaaugccggugcugugggcaguggcc

SEQ ID NO: 4196547 - RNA, 59 nt, Human
ggccugcccagggucaccacagaggccucuugccuucuggucccuuccacugggcugcc

SEQ ID NO: 4196548 - RNA, 111 nt, Human
ggccuggacuccgagaugaacuggcuuggggcgcccucagguggccacauaaaaaaccacagucugaggccagccuggggcucccagaccugggcgggaucuuuccaggcc

SEQ ID NO: 4196549 - RNA, 66 nt, Human
ggccuggagaaaggaaggugggaaggccaggacucggacuuaccaccugacuccuacuccagugcu

SEQ ID NO: 4196550 - RNA, 67 nt, Human
ggccuggagcagagccuacacccucaucccagccucucccugagucuccaaggccucccuccaggcc

SEQ ID NO: 4196551 - RNA, 78 nt, Human
ggccuggagcugcuguccuugggugaaauugcucgugggcucaccuucuauucgggggacacagaauuccacucuguc

SEQ ID NO: 4196552 - RNA, 125 nt, Human
ggccuggaguggagcccucgcaggcucuugguacccuggcugucaagcuguguguuuggcugcccuguuuagccaggguuucaggagguuucugugccuguggggugcaggucagacuccagguc

SEQ ID NO: 4196553 - RNA, 113 nt, Human
ggccuggcccugggcggccgcgcaggaucuggggccguccgcgggcugcagcccgguucgggagccucguggcggccacugcgccugccugcagcggcucgcggggccgggcc

SEQ ID NO: 4196554 - RNA, 62 nt, Human
ggccuggcugacaccuugauagcagccucaugaaggacugaagcaaaggaucgagcuaagcc

SEQ ID NO: 4196555 - RNA, 55 nt, Human
ggccugggccuugccugagaccaugcagauggcauggcagaacaccucgcccgcc

SEQ ID NO: 4196556 - RNA, 74 nt, Human
ggccugggcuaucguggccuccuaggcucacuccuggaagacagagacaaccugaggucagcgguucccacacc

SEQ ID NO: 4196557 - RNA, 80 nt, Human
ggccuggguuugucagcaggcaggaggcaugccaggaguucuccuaggugucaggccuccuccagccgcuucccuuugcc

SEQ ID NO: 4196558 - RNA, 88 nt, Human
ggccuguauguuuuacgcagcugcuccaggaagcuguuguagaagcccucugccugcuccgugggcauugcuagguggaaaucaggcu

SEQ ID NO: 4196559 - RNA, 60 nt, Human
ggccugugcaagacagcaccccgcaacugcauaaaggucaaggggaugcugcuugcagcc

SEQ ID NO: 4196560 - RNA, 59 nt, Human
ggccuguggcaaggugagaaugacaaaucaauaucauugucauaguagaagccaagguc

SEQ ID NO: 4196561 - RNA, 74 nt, Human
ggccugugguuugauuaagcauuuuaccuuauuuuagaagggaugaugucugugagaucaaacuaagacagguc

SEQ ID NO: 4196562 - RNA, 90 nt, Human
ggccuguucucugggcagcccacguucuguccacgcuggcagcuuugagaugcccacaggagcugggucuugggccaggagacacaggcc

SEQ ID NO: 4196563 - RNA, 55 nt, Human
ggccuuaggcucaacaggcagagucaguugauaucuacagagugacccugaggcc

SEQ ID NO: 4196564 - RNA, 67 nt, Human
ggccuuaggggugaggcagaccucaacugcgaaaaguccccagggggcugcucccaccccugaggcc

SEQ ID NO: 4196565 - RNA, 58 nt, Human
ggccuuagugagguccugaugcagcccuggugaggcccuggggaggccuagugaggcc

SEQ ID NO: 4196566 - RNA, 69 nt, Human
ggccuuccaaagugcugggguuacaggcgugagccaccgcgcccagccacagucacuuucaucagggcc

SEQ ID NO: 4196567 - RNA, 62 nt, Human
ggccuuccacggagaacgaccgaggguauaaagugaaggcccugggcuuugcuggcaaggcc

SEQ ID NO: 4196568 - RNA, 88 nt, Human
ggccuucuggacugugaacuggcuuaguucuagaaauuuggugaaaagcuguacuucuccaucuacugacuuagccucauuucuggcc

SEQ ID NO: 4196569 - RNA, 92 nt, Human
ggccuucuggcuguggucagaggcuuuucuggucuuuggcugagccgugcagcucugggaauucagaaagccucugacuacaggacuaggcu

SEQ ID NO: 4196570 - RNA, 64 nt, Human
ggccuucuuuaguauugaguuaugguagccucuaaggcuccaugugaucugaagaauuauugcc

SEQ ID NO: 4196571 - RNA, 79 nt, Human
ggccuugcuuggguuauaugccauccuuggaucaauuacaaaagacagaauauggcauucuaggccaaaaucaggagcc

SEQ ID NO: 4196572 - RNA, 70 nt, Human
ggccuuggaaggacgggcuguaucugguaucagagucaccaggauagaugauccccauccacuccaggcc

SEQ ID NO: 4196573 - RNA, 60 nt, Human
ggccuugggcaaaguguuucuggagcaaaaaagaugcucagaggguuuuggccaagugcu

SEQ ID NO: 4196574 - RNA, 71 nt, Human
ggccuugggcagcaggcuccacguuccugcucaucgggagcccccaggaaucuugucuguugucccuggcc

SEQ ID NO: 4196575 - RNA, 69 nt, Human
ggccuuggguauagguggguauguaacaaggaaaauacauaaauaaacaaucaccugcauucuaggguu

SEQ ID NO: 4196576 - RNA, 58 nt, Human
ggccuuguagcagagggaugcacccugcaggguggaggugggugccugccacggggcc

SEQ ID NO: 4196577 - RNA, 84 nt, Human
ggccuugugugagcugggccugggauccuaagagaguuuuagcuuggacaucuggacgagccccagccccucucucacaagucc

SEQ ID NO: 4196578 - RNA, 65 nt, Human
ggccuuguguuuacaccugucuuugagcauuauagaagaaaaaagacagacggaaaccugaggcc

SEQ ID NO: 4196579 - RNA, 112 nt, Human
ggccuuucagcuuacagcagccauucuggagucauuggggcugaucgcauccugccagguguuccaucagauccuacugauugcuugcuuugauguauguucaaaaaagguc

SEQ ID NO: 4196580 - RNA, 60 nt, Human
ggccuuucaggugauccagggugagcguccccacagagccacccugcauacuggaaggcu

SEQ ID NO: 4196581 - RNA, 62 nt, Human
ggccuuugggcagugggcuuagcggcgugcaccaugccacucgggccacacgugcccuggcc

SEQ ID NO: 4196582 - RNA, 76 nt, Human
ggccuuuggugcagguugccugguaggugcgacacgcaggucuccucugggcugccugcacgggugggagcaggcc

SEQ ID NO: 4196583 - RNA, 60 nt, Human
ggcgaagggcuucucgccugugugcacgcgcuggugcaaaaagagcgaggagcccuggcu

SEQ ID NO: 4196584 - RNA, 66 nt, Human
ggcgaagggggugcauuugugaaugaaccagaauucugguucaaggaaacagcugaccccauugcu

SEQ ID NO: 4196585 - RNA, 77 nt, Human
ggcgaauggaugcuggucaguuuggcaaauucacugaaacucaucaagaacccagcugaacuugcauuccaacuucc

SEQ ID NO: 4196586 - RNA, 59 nt, Human
ggcgaauugaaaaaguauugaagguauuucaauacuuuuucaauacuauuucaauaguc

SEQ ID NO: 4196587 - RNA, 83 nt, Human
ggcgagagucauugcauucuuuaagccaguuacccauuuacaccugcaccgugauggcuuauggagagagcaacagacacgcc

SEQ ID NO: 4196588 - RNA, 61 nt, Human
ggcgagcagcgcugugucaggucaaagggagagaguuuuggggccugugaggccuuuugcc

SEQ ID NO: 4196589 - RNA, 113 nt, Human
ggcgaggccgccuccgcccacaccccugugcgcuccggcgagucagcggcaccgcccaggggccgcuggguuggggcggcgggggucgcgcuggguggccauccuaccucgcc

SEQ ID NO: 4196590 - RNA, 61 nt, Human
ggcugucucauaguuagagacacagagacaaguauauucucuguguccugaaaugaaggcc

SEQ ID NO: 4196591 - RNA, 62 nt, Human
ggcugucucugugacugccacccaaagaaucucucaccuggaacagagauagaaagacagcc

SEQ ID NO: 4196592 - RNA, 64 nt, Human
ggcugucuguuuuguauacaggccugggaaacuccucuggucuagaucaagaacagaacuagcc

SEQ ID NO: 4196593 - RNA, 79 nt, Human
ggcugugaacucccaguguuuacaguugaacaaaugauuuggccaucuguucagaauuguaacacucacaguucuugcc

SEQ ID NO: 4196594 - RNA, 66 nt, Human
ggcugugaaguucuuugcuccccaguaccaccaccuggcuaccugagcaagagcuucaaaacugcc

SEQ ID NO: 4196595 - RNA, 60 nt, Human
ggcugugcaguucaccaagcccucuccauacaucaaggcuuccuguggacauugcuggcc

SEQ ID NO: 4196596 - RNA, 88 nt, Human
ggcugugccagguuuucagaugcaauuaauuuucaagauaagcucuaaacuucugaaaugucuuugcaauugaaaugcugauacaguc

SEQ ID NO: 4196597 - RNA, 68 nt, Human
ggcugugcgucauccggcugcagauuaccaacaaaugugccagccagucaggcaugaccgcauacguc

SEQ ID NO: 4196598 - RNA, 90 nt, Human
ggcugugcuaaggucacacagcagccccggguguucacguguaugucuugagcacacacugggagcagcugugagccuggggucacagcc

SEQ ID NO: 4196599 - RNA, 55 nt, Human
ggcugugcuuugcccaaagggcugugguuucuuagcagucuugugacagccagcc

SEQ ID NO: 4196600 - RNA, 55 nt, Human
ggcugugggugugacaggccucugauuaauaggacuguccaauaagcccccagcc

SEQ ID NO: 4196601 - RNA, 55 nt, Human
ggcuguguccccaccugagcagucccaaccacaggcuccagguggagagacaccc

SEQ ID NO: 4196602 - RNA, 68 nt, Human
ggcugugucccccagauacaugcacagguguaugcaugugucugugggcacacacacacaauuuugcc

SEQ ID NO: 4196603 - RNA, 67 nt, Human
ggcugugucggugccaccugcuaugccugggcuuggugccacguggcagugccagcuccgacaagcc

SEQ ID NO: 4196604 - RNA, 82 nt, Human
ggcugugucuuuaaagcagcggugucuuuacugcagugugaguuuucacggcgguggacggacuccuugcuggacgucagcc

SEQ ID NO: 4196605 - RNA, 57 nt, Human
ggcuguguggccgugggcucuagcaccugccaggcgucaggagacccccacuacacc

SEQ ID NO: 4196606 - RNA, 99 nt, Human
ggcuguguuuuuguuggcgguauugcugcuggagccauuuuccguuuggagggcuccugauaggagaaugcgggucagcgaguuuagaacagcacagcc

SEQ ID NO: 4196607 - RNA, 106 nt, Human
ggcuguuaggcauucugucuguccugagcuggcuugucaaccagggcaugagugagucagacugcccugcagccggccagcucauuagucagccagccauucagcc

SEQ ID NO: 4196608 - RNA, 80 nt, Human
ggcuguuagugaguucugugagugagucuagcaaauuaucaagcccgagaguagccucauagacacucauucuuacagcu

SEQ ID NO: 4196609 - RNA, 69 nt, Human
ggcuguuccagagguuacugaggggcccccaaggaagagaggggcccagaguggccacuuggcucagcc

SEQ ID NO: 4196610 - RNA, 71 nt, Human
ggcuguuuacuuguaaguaacaagugagaaaugaaaacuaaguuaucucauugcuuacauaguuaugagcc

SEQ ID NO: 4196611 - RNA, 71 nt, Human
ggcuguuuacuuguaaguaacaagugagaaaugaaaaguaaguuaucucauugcuuacauaguuaugagcc

SEQ ID NO: 4196612 - RNA, 78 nt, Human
ggcuguuuguccuccuaguuccugccaguuguuccuaacgccguagccuggagggcucuagagaggccauccaaaucc

SEQ ID NO: 4196613 - RNA, 55 nt, Human
ggcuuaaaaggaaaaugagagucagaggcaaaaauuggcauguuucuuuuaagcc

SEQ ID NO: 4196614 - RNA, 88 nt, Human
ggcuuaaauaucagacccugaugagcuuuguuaguaugaaucaccuucccgaauaugcuaaauauguucacauugaugaaauuaaguu

SEQ ID NO: 4196615 - RNA, 68 nt, Human
ggcuuacacaugucucaguggaaaucgccaacgguuuuguuacauggcaguguuuaagacuaagagcc

SEQ ID NO: 4196616 - RNA, 83 nt, Human
ggcuuacaccuguaaucccagcuacucaggagggugaggcaggagauuugcuugaaccugggagguggagguugcagcgagcc

SEQ ID NO: 4196617 - RNA, 94 nt, Human
ggcuuaccauguuuguggagacuuuuauugguaaugauaaaaguugggcugacaacauuucuaucauccuguaauguaaugcacacacagagcu

SEQ ID NO: 4196618 - RNA, 55 nt, Human
ggcccuguuagagcucccacaaccuuccuguugcccuggucauggcuacagggcu

SEQ ID NO: 4196619 - RNA, 120 nt, Human
ggcccuuccuggacucacaucacagccacagcgcagccugggcuucuccuacuuccagcuccggacagcagggggaggcugugcugcgucuggcuguagauaugggugcagaaguggguc

SEQ ID NO: 4196620 - RNA, 67 nt, Human
ggcccuucuggaggacacuggccccauuuuucucuuggucccauuguucugcccaggacccaggguu

SEQ ID NO: 4196621 - RNA, 55 nt, Human
ggccgagccaggauuugaacccaggcaucuggcuucagagucugaguucuuugcc

SEQ ID NO: 4196622 - RNA, 76 nt, Human
ggccgaggugggcggaucaccugaggucaggaguuggagaccagccuggccaacguggugaaaccccaucucuacc

SEQ ID NO: 4196623 - RNA, 67 nt, Human
ggccgccagcgucucguugugggccucgcccgggguccgguuggcggccggcucggggcgcacgguc

SEQ ID NO: 4196624 - RNA, 65 nt, Human
ggccgccguggcaccugcucgcccuagcccugcaacaggccuagggucaggggccugcgucggcc

SEQ ID NO: 4196625 - RNA, 61 nt, Human
ggccgccuggguccaccgcucgcgcucccaggggagugggccggacagcccaggccccgcc

SEQ ID NO: 4196626 - RNA, 72 nt, Human
ggccgcgaggcugcggggaggagccugcacgagggcccggcagccccggcagcccccccagcccucggcgcc

SEQ ID NO: 4196627 - RNA, 71 nt, Human
ggccgcggauuggccugccccgagauccuggccacugauuggucgcccggacggggcggggccacguggcc

SEQ ID NO: 4196628 - RNA, 100 nt, Human
ggccgggaccgagggggagaggcugcgguggggaaaggaggugcuggggagaagggaagcccagaccgcuaccccucacccccuuuuccccagccuggcc

SEQ ID NO: 4196629 - RNA, 93 nt, Human
ggccgggauggucucgaucuccugaccucgugaucugccagccuuggccucccaaagugcugggauuacaggcgugagucaccacgcccggcc

SEQ ID NO: 4196630 - RNA, 56 nt, Human
ggccgggcaggucucagccagccugucccucccacauuccugaaaccugcccagcc

SEQ ID NO: 4196631 - RNA, 57 nt, Human
ggccggggccugcucgccugugcgggugaccacggacucgcuggggggccccuggcc

SEQ ID NO: 4196632 - RNA, 64 nt, Human
ggccgggguccgggcaguaggcugcaggcuucguccucugacagcagacagccuggccccugcc

SEQ ID NO: 4196633 - RNA, 67 nt, Human
ggccuacccgggagacuccucuagggcugugucgaggagggcagcccccaggagucuccacgccgcc

SEQ ID NO: 4196634 - RNA, 96 nt, Human
ggccuagauagccucucagcuuuuagaaccgagccuuccgagaugcuuggagaguucuaccucugaaggcgagcgggcacaaagaguagugggguc

SEQ ID NO: 4196635 - RNA, 76 nt, Human
ggccuauuggcagagcuuuacaggcuaucuaugaagaaaaauacacuguacgcucugcuucaaguaagguggugcc

SEQ ID NO: 4196636 - RNA, 59 nt, Human
ggccucaagcuacccucucaccucagccucccaaagugcggggauuacaggcuugggcu

SEQ ID NO: 4196637 - RNA, 100 nt, Human
ggccucagacuaauucacagcauuugcccaucugggauccuaccgcagauggcuggagguagaugcucacugaacagaguucaaaaaacacaaaggggcu

SEQ ID NO: 4196638 - RNA, 94 nt, Human
ggccucagcugaaggccuggcucugagccagccaccuccuucacacaacccaccuugcucugaagcugccugcucacagccaugccccgaugcc

SEQ ID NO: 4196639 - RNA, 76 nt, Human
ggccucagggaaucagacucugcagccagucagugucagagcugcacucugcuguucacagacucugcucuggguc

SEQ ID NO: 4196640 - RNA, 83 nt, Human
ggccuccaagccuggaggaggaguugagcacacagacgacugggguguucauuguuucuucuucuuuuggcuuguaaggugcc

SEQ ID NO: 4196641 - RNA, 71 nt, Human
ggccucccaaagugcuaggauuacaggcugggaucacacugugccuggcccuagcagcuuuguccugugcc

SEQ ID NO: 4196642 - RNA, 73 nt, Human
ggccucccaggagcuucucucugccucugaguugcuacagagcgugaggcccacgaggcaaguuccucaggcu

SEQ ID NO: 4196643 - RNA, 108 nt, Human
ggccucccaggcaguggauguucacagcugggacaagacuggggggcuacaaaaauggcugccaauagcuggucuuuaagcauguaacaaauaccuuccagggacucc

SEQ ID NO: 4196644 - RNA, 65 nt, Human
ggccuccucauugcucugaacccagggcaccauucuggcaugggucauggguggagcugggggcc

SEQ ID NO: 4196645 - RNA, 72 nt, Human
ggccuccuucuacaaagugcuuuagaaaugaaagggaacuuagagaggauugaauuuguagggagagaggcu

SEQ ID NO: 4196646 - RNA, 68 nt, Human
ggccucgggcacggaaggcgccaggggugcggguuccugcaaccccuuggaguccgcgcccagaggcu

SEQ ID NO: 4196647 - RNA, 112 nt, Human
ggccucuaguggaguuaggcuggcuguccuuucauccccagcuauacagggcuggauggcuguggguggaaggaaaccaggcaggcaccuucacccacuggggacacaggcc

SEQ ID NO: 4196648 - RNA, 63 nt, Human
ggccucucuugggacagcugucuuguaagacacugcugauucuccucaagacuuucgcgggcc

SEQ ID NO: 4196649 - RNA, 59 nt, Human
ggccucugcagagcauuauagcaaaagguuaacuacuuuucuagaggaucugcagagcc

SEQ ID NO: 4196650 - RNA, 73 nt, Human
ggcuuucuuggggcuccugcgccauucucccaggaaagugaggcgaaggugcuggcgccccaggagacgcgcc

SEQ ID NO: 4196651 - RNA, 55 nt, Human
ggcuuucuuguuaaauguccauuauucaagccuguggacaucuucuugggaggcu

SEQ ID NO: 4196652 - RNA, 91 nt, Human
ggcuuugaaguagagccaaugagcuuaacuuggccuguggggaaugccuggcagcugucuguggggucucuggccugcuuucaaaauagcc

SEQ ID NO: 4196653 - RNA, 77 nt, Human
ggcuuugaggcugggagaggcccugaagugacucauuuuccauuuguuuuucagacucaucucaagcuuuuauagcc

SEQ ID NO: 4196654 - RNA, 61 nt, Human
ggcuuugaguuccugcuauguccucuuaaacaaacaucaagagagccaggaacacacagcu

SEQ ID NO: 4196655 - RNA, 71 nt, Human
ggcuuugcugccucucccagcucccuggagacaguggagagagauaagccuggucgagagcacagccggcc

SEQ ID NO: 4196656 - RNA, 63 nt, Human
ggcuuuggaguuggcuacauauuucucuuccaagaugagcuguuugcuucaauuccagaagcu

SEQ ID NO: 4196657 - RNA, 82 nt, Human
ggcuuuggcagugcuuacaucguguuggaaagucaaaaccuaaaaaaccagauuauucaacaucauuguaagccucuaaacc

SEQ ID NO: 4196658 - RNA, 95 nt, Human
ggcuuuggcuuucuccauguuuuugcuggugaccucgugcagagcacagcagauggcugcauggacucaucagacaagauacuggggccauugcc

SEQ ID NO: 4196659 - RNA, 69 nt, Human
ggcuuugggcccucaagucuccuggguaccauggcugaaucuuccuggggcuguaggccgcccagggcc

SEQ ID NO: 4196660 - RNA, 60 nt, Human
ggcuuuggggguguccaagaaaugucaguugugggaaggauuuggagcaucccaaaggcu

SEQ ID NO: 4196661 - RNA, 64 nt, Human
ggcuuugguaagcuauggcuucuauacaucaagggcccccuuauauuggccauggugcaagguu

SEQ ID NO: 4196662 - RNA, 59 nt, Human
ggcuuuguggggugaaguaaagggaaugaacguggguccucagcccacccuuaggagcu

SEQ ID NO: 4196663 - RNA, 66 nt, Human
ggcuuugugguugacuggaggagcucuuguuuaccaaaauuuggagcuguuggcagcuaucuugcc

SEQ ID NO: 4196664 - RNA, 66 nt, Human
ggcuuuuaaugagcauuuuagaauugaagagccccaaguucaggauaucucaauguucagaaagcu

SEQ ID NO: 4196665 - RNA, 84 nt, Human
ggcuuuuagagaacuguggcuuucucugccuccuucuuggaauccacuuaccauguugagaggggcccaagccacauagaggcc

SEQ ID NO: 4196666 - RNA, 56 nt, Human
ggcuuuucaauaaaauccugcuucccuuggaggcagucuuugaaugugaaauaguc

SEQ ID NO: 4196667 - RNA, 65 nt, Human
ggcuuuucccaaaugcaaugaaaauugaguugaauuagucuuuauacaaacugggaaacauagcc

SEQ ID NO: 4196668 - RNA, 130 nt, Human
ggcuuuucuggacaaucaguggaagcaauagccauauggagaauauuuccaaaucuaauggaaccccuaccauuagacauagaauauugucuagcuggcauauuauucaauauccuguacauuaagagcu

SEQ ID NO: 4196669 - RNA, 74 nt, Human
ggcuuuucuuuggaggguaauacauuuuaaaacauuuagugugccaccuacugcuccacagugacuagagagcc

SEQ ID NO: 4196670 - RNA, 98 nt, Human
ggcuuuuugaaauguugguaacuauuaacuauuaccacucuagguuuaagauagaccguuuaagccccucuguagcuaauaguauaagagcaaaagcc

SEQ ID NO: 4196671 - RNA, 112 nt, Human
gggaaaaagcugaguguugggagggaaacugaggcagggcuugcauuuguccucuggaaugugucuagacuugcuggcuccuugcuucuagcccuucuagacuccuauuccc

SEQ ID NO: 4196672 - RNA, 67 nt, Human
gggaaaaagugguucagaaugccugggcagagccggagcuacagggauuccugccgcucgcguuccc

SEQ ID NO: 4196673 - RNA, 108 nt, Human
gggaaaacaggacaaccaggcaccuggggccacuugguggcagugugggcaggaacggcugcuaucuaggcaaggugguccagggugccaggagucauugcuauuccc

SEQ ID NO: 4196674 - RNA, 59 nt, Human
gggaaaacagggcugcugcucacccugcuugucccuggcacagaaagcugccuuguccc

SEQ ID NO: 4196675 - RNA, 89 nt, Human
gggaaaaggcuguuggcuuuucguuggucauuccccagcccauccccaggauccagcugcaagaaccaaggaaagaagccagccucccc

SEQ ID NO: 4196676 - RNA, 57 nt, Human
gggaaaauauuaagcaggacuucuaagcccaaagaagucauauuuauauaauuuccc

SEQ ID NO: 4196677 - RNA, 59 nt, Human
gggaaaaugcaguugaauuuggguaugacaccugucaacagcaaaggaaacaugcaccc

SEQ ID NO: 4196678 - RNA, 59 nt, Human
gggaaaauggccagugggguugagcaggacacagguccugcugugucuagcugguuccc

SEQ ID NO: 4196679 - RNA, 72 nt, Human
gggaaaauuacccagggauuaccaugugaaaauuacaucacagaaaauaguuaacucuugguaauagguccc

SEQ ID NO: 4196680 - RNA, 74 nt, Human
gggaaacccguuuaauuacucgagcugucaaaauguuuuauuguaaacagcuuuucugauagauccuguuuccc

SEQ ID NO: 4196681 - RNA, 63 nt, Human
gggaaacgauguagaagauguauugggucuguauuccaugaaaucauuuucucauugugcccc

SEQ ID NO: 4196682 - RNA, 61 nt, Human
gggaaagagagguggacgcaggucaaagauaucacauccucuccucucaccuuuccuucuc

SEQ ID NO: 4196683 - RNA, 76 nt, Human
gggaaagcagaagguuggggcuggaggucugcuggcaggcaggcagacauuuggagccaacuuuccugcucagccc

SEQ ID NO: 4196684 - RNA, 64 nt, Human
gggaaaggagcaugcguaccuucuucaguuucugcaccgcuggagggcauagcuguucuuuccu

SEQ ID NO: 4196685 - RNA, 59 nt, Human
gggaaagggaaguagagaggaggagccucagaugcucaggcucuguacucccuuugccc

SEQ ID NO: 4196686 - RNA, 68 nt, Human
gggaaaggugauagagacaagaaugggguugaugccugauauuccaugugcuugcucuggcaccuccu

SEQ ID NO: 4196687 - RNA, 87 nt, Human
gggaaagugaagccuggaggagcuggacgcggggaggccggggcaggaggggcuucucuggcuccugccggguccacacggucagcc

SEQ ID NO: 4196688 - RNA, 69 nt, Human
gggaaauacacuuccaaacuaaguuggggaggugcucccagaucauaguuuuuaaguguacaauuuccu

SEQ ID NO: 4196689 - RNA, 70 nt, Human
gggaaaucaguuuuuguuugccagauagcuauguauaucuagcuuuggagagucccacgaacuucuuccc

SEQ ID NO: 4196690 - RNA, 69 nt, Human
gggaaaugaacuguaaguggugaaauuaguuuugguauuuaauuuaaaacuacauuuauaguuuuucuc

SEQ ID NO: 4196691 - RNA, 109 nt, Human
gggaaaugguacaauaucaauauuaguguauuaaaaugcuccuaagaguaugcuaagauuuuuguuguuuuugguauauugguacuaaggguguuguugucauuuaccu

SEQ ID NO: 4196692 - RNA, 71 nt, Human
gggaaauucagguaauuugcagccacaguaaucuucacuauacugaaauguuaaauacuuggcuuuucucc

SEQ ID NO: 4196693 - RNA, 119 nt, Human
gggaguuuuuuuggagaaggagucuugcucugucacuaggcuggagugcaguggcacgaucucggcucacugcaaccuuugccucccagguucaagcgauucuccugccccaggcuccc

SEQ ID NO: 4196694 - RNA, 115 nt, Human
gggauaaguuggugaaagguuuagguguacaaaguaugaaccaguuucucucaggcuuauguucuuuuugccucaggaagcucauuuugacauauccccucacagacuauuaccc

SEQ ID NO: 4196695 - RNA, 83 nt, Human
gggauagauuccuucuccagaacuucuaggaauggaauugaaucuauuaugucuccagaacuucuagagauggauucuauucc

SEQ ID NO: 4196696 - RNA, 80 nt, Human
gggauaggggcuguggacuggcccugguauguguacugaggugaugaggguguggcagugccaugucugagccccuaccu

SEQ ID NO: 4196697 - RNA, 120 nt, Human
gggauagguguaggagguaggcccuuccuugaugauuuucccaggauagaccaucaucccucugggugaaggugaaugucuauggggaaggccuccaggaaccacccucuacauguuccc

SEQ ID NO: 4196698 - RNA, 78 nt, Human
gggauaguggguuuucaggcauguacuuuaccuguuaguuuagggagcugaaggcaaaacauguuacaccucugucuc

SEQ ID NO: 4196699 - RNA, 59 nt, Human
gggauaguuguguggggauucugguaguuucugagccaguuguaauccacaccuguuuu

SEQ ID NO: 4196700 - RNA, 60 nt, Human
gggauaucuggggacugaauuuagaguguuucccuuuucuaucuacuacuuagauauucc

SEQ ID NO: 4196701 - RNA, 71 nt, Human
gggauaugcuggauugagagcaaggggucccaccaucagaauaugacuccaccuuucccuauccuguuccc

SEQ ID NO: 4196702 - RNA, 62 nt, Human
gggauauuucacaggccagugguggggccuuuggcccuuggcccuucccugcuguggaaccc

SEQ ID NO: 4196703 - RNA, 82 nt, Human
gggaucacaagaaaugagguaguauuagaaggagagaugacagguucccuggaaggguacugauuuaacuugggugaaugcc

SEQ ID NO: 4196704 - RNA, 76 nt, Human
gggaucaccuucaucguauggccgaauguacauuguugauuucaaguauguuaagugagcuuaugaugaggguccc

SEQ ID NO: 4196705 - RNA, 76 nt, Human
gggaucccagagagguagcuuacccucuucugccacgugaggcucugacgagaagguggcuggcugucugugaccc

SEQ ID NO: 4196706 - RNA, 102 nt, Human
gggauccuauugccuuugcuuugugccccaagguauagaguuuggaaaaauaccagugcuggugguucuucuguuucggggaauaaagaaaaggaauacccc

SEQ ID NO: 4196707 - RNA, 61 nt, Human
gggauccuuggcugcaggccaaguuugccuagacucccuuggcacugagccagauggacuc

SEQ ID NO: 4196708 - RNA, 56 nt, Human
gggaucugaccaaggagacgucucucacccacugugcguccccuugagcagguccc

SEQ ID NO: 4196709 - RNA, 56 nt, Human
gggaucugaugcacugcugaaaaugaggucagauagcuaaggguagcaaagauccu

SEQ ID NO: 4196710 - RNA, 84 nt, Human
gggaucugcauaugugugggggcugggaaggaagccaggcccccugcagccaggccaagccuccccagcuccccaccgggucuc

SEQ ID NO: 4196711 - RNA, 113 nt, Human
gggaucuggccaguggguggcauaaauuugguggaccucaucagaaccggacauugcugucacggauuugacugagguccugccaggagucggccuuugcugccuccagaccu

SEQ ID NO: 4196712 - RNA, 55 nt, Human
gggaucuugcaugaaucaaaagaacgacacauguguuuucuuuucaugugaucuc

SEQ ID NO: 4196713 - RNA, 55 nt, Human
gggaugaaugccuggcucccccuucuuuccagcccuagcucaggcccaucguccc

SEQ ID NO: 4196714 - RNA, 67 nt, Human
gggaugaggcaagccagaggacugguggacagagaacuuucgucuucugaauauugucuuauuuccc

SEQ ID NO: 4196715 - RNA, 76 nt, Human
gggaugagguucgauacagcguauuuauugcuugucauguaaauuaaaaaccuuguauuuaacucuuuucaauccu

SEQ ID NO: 4196716 - RNA, 86 nt, Human
gggaugaguaauagguugugcagggcgaggaccugacauuaaaauaagucucagauuucuucuugcaacggcugcagauuuauguc

SEQ ID NO: 4196717 - RNA, 66 nt, Human
gggaugauucucauguucccugagaaugucaaggaauggcaauugagggaacaugagaaucaucuu

SEQ ID NO: 4196718 - RNA, 58 nt, Human
gggaugcaguauguauauuuucuaaaugaaaaguugaaagugggcaaccugcacuccc

SEQ ID NO: 4196719 - RNA, 65 nt, Human
gggaugccagagguuacuuugccuuggaacucuuccacgccaaaauuuguagcuucuucagcccc

SEQ ID NO: 4196720 - RNA, 72 nt, Human
gggauggaacacucgucaaauagcggguuuucuggaggcaggucccgugguggggaguggcuuccuuguccc

SEQ ID NO: 4196721 - RNA, 68 nt, Human
gggauggagagcuagugccugccaguagggcugcacgccugcgggugguuagguuggcucuuuguccc

SEQ ID NO: 4196722 - RNA, 85 nt, Human
gggauggauuuggaguugauaaaaugauaucuucuuuaugaaauagaaguaaggaguaucuguuuucucacccaaguauaguccc

SEQ ID NO: 4196723 - RNA, 55 nt, Human
gggauggcuuggagacagggccuguuuauaauuacagggauuuuccaggcuaccc

SEQ ID NO: 4196724 - RNA, 58 nt, Human
gggaugggagcagaggacgaccaguauccaaaaugguuggguagcugcguuuuaucuc

SEQ ID NO: 4196725 - RNA, 60 nt, Human
gggauggggaaagcccaaaacacccugcuggaagcgcugucucggggcuuucuccugccc

SEQ ID NO: 4196726 - RNA, 78 nt, Human
gggaugggguaagcccuaauugguaguguuugccaauuucucucguguaaauacucccaccauggcugauuucaugcu

SEQ ID NO: 4196727 - RNA, 70 nt, Human
gggaugguugaagggggcagagaaauggcauaugcuuuucucaaggcagggccucugucccccagcacuc

SEQ ID NO: 4196728 - RNA, 77 nt, Human
gggauguaaaugcagucucuacagcuccucugggccucuaaguguacagacuguauuuacaaguuuauaaaacuccc

SEQ ID NO: 4196729 - RNA, 61 nt, Human
gggaugugaaacacccuccaaugcacagggcaggcccugcugcagagaauguuuuggcccc

SEQ ID NO: 4196730 - RNA, 63 nt, Human
gggauguggcagcuggagguggagaagacuuuuuucucccuuccuccuccaccugucuuuccc

SEQ ID NO: 4196731 - RNA, 79 nt, Human
gggauguuaugugucuggcauggaaaguguuacuugcuuuauuaucuuaacaauccuguaagacagguaucaauauccc

SEQ ID NO: 4196732 - RNA, 60 nt, Human
gggauuaaaugaguagauacuuauaaagcacuuaaaauaaugucugcucauaauaaaccc

SEQ ID NO: 4196733 - RNA, 129 nt, Human
gggauuaagggagacuuagggcauuuaaggucugguggccuggcuaugacugucugugcuggcauaggcucuccuccccaggaccaucuauuuuauuuguucuggcuauuauuuauuccuuagaugguc

SEQ ID NO: 4196734 - RNA, 72 nt, Human
ggauugccccucuuccugaagagguuggucaggaaaauuuuuuguuaacuuuuauuuuagguuugagggucc

SEQ ID NO: 4196735 - RNA, 60 nt, Human
ggauugcuaugaggauggaaaaaacugaccaauguggggguauuuuacucauagcaggcc

SEQ ID NO: 4196736 - RNA, 71 nt, Human
ggauuggagacacagcaauaacuacuguugccauggaaggguuaacaguguaggagcugguuuaucagucc

SEQ ID NO: 4196737 - RNA, 62 nt, Human
ggauuggaggagcugcugaggguuggguuacaagggccaggggugcucugguuccuucaacc

SEQ ID NO: 4196738 - RNA, 73 nt, Human
ggauuggcuugcacuguauuuuaagggcuuauauuuggaaucucucuuuaaaauauuauaguucaaccaauuu

SEQ ID NO: 4196739 - RNA, 77 nt, Human
ggauuguguccagauuguuuuugcuggggugaagagugaauaucuucuagggaaaggauuuacaguuugauauagcc

SEQ ID NO: 4196740 - RNA, 93 nt, Human
ggauuuaagguugaccuaauaugguuuaguuuaaugaguuuuggacucagggcuuuauuucacuguaccauaaacacucaaauucuaaaauuc

SEQ ID NO: 4196741 - RNA, 62 nt, Human
ggauuuacuaucuugaaauauauggaaaauacacucagauauauuguagggaaaguaaguuc

SEQ ID NO: 4196742 - RNA, 57 nt, Human
ggauuuagaguucuaaggacggguuguccagcgcagcccagcagagaaccuaggucc

SEQ ID NO: 4196743 - RNA, 84 nt, Human
ggauuuaggugaggcauuuuguaacaaguaaauaucacugaacuaguuuuucagaaauaucaguugaaagugcucaucagaacu

SEQ ID NO: 4196744 - RNA, 57 nt, Human
ggauuuagguucggguaguugggagaaguagauguuccagcagagcccugaagaucc

SEQ ID NO: 4196745 - RNA, 62 nt, Human
ggauuuaucugcucuucgcguugaagaaguacaaaaugucauuaaugcuaugcagaaaaucu

SEQ ID NO: 4196746 - RNA, 65 nt, Human
ggauuuaugcauaagacacgcacaaggcuuuacuuuuuaauugugauuuacuucuggauaaaucc

SEQ ID NO: 4196747 - RNA, 79 nt, Human
ggauuucauaagacuuaggucgaguuuggcuuuuaguugugccugccgccuaucgaacucuuaauucauuaugucaucc

SEQ ID NO: 4196748 - RNA, 57 nt, Human
ggauuuccaaccagaaagguuccucucaaaucuuaagagcuuucuccuuggagcucc

SEQ ID NO: 4196749 - RNA, 58 nt, Human
ggauuucuaguaagucaugaaggcuuaaugcugugucuuugugaaaggacugaagucu

SEQ ID NO: 4196750 - RNA, 63 nt, Human
ggauuucuuuuggaaguuaaucaaagaauucagcugccacuuuaaaaguuccacaagagaucu

SEQ ID NO: 4196751 - RNA, 127 nt, Human
ggauuuguuccccuggaauauuauagauuauauuuuauguuggaauuacaucagugugcagagcagcagaaggcuggcuuaauguagcuaaaaauauaccuugacuuuccacuuggaauagaacucc

SEQ ID NO: 4196752 - RNA, 70 nt, Human
ggauuuuaucaaucuaugucaucaugaccucugaaauccaaccuuuggucaggagcauauauugaugucu

SEQ ID NO: 4196753 - RNA, 86 nt, Human
ggauuuucuacuaacugaaaaugucuagaaucuagaauauuucacaaugaauguuucagagcacugggcuuaucuuuugggaaucu

SEQ ID NO: 4196754 - RNA, 109 nt, Human
ggauuuucucuagaagacauacuggccuuuuuagaaaacagcuucuggcaugcaccaagauauuuugugacucucagcucuuugagaaggcagugugucucagaaagcc

SEQ ID NO: 4196755 - RNA, 58 nt, Human
ggauuuuucuuaugcucuucucugcacgucugcacaaagaaggcaaaagcagacaucu

SEQ ID NO: 4196756 - RNA, 69 nt, Human
ggauuuuuuucucuuauaaaaucucuguuguacacuuuaugacaggauggagauaauagaaaaaguucu

SEQ ID NO: 4196757 - RNA, 73 nt, Human
ggcaaaaaaguucaugguguuauagaaaaguaaacauuuuucacuuaaugaaaccaugagcuuuucaugugcc

SEQ ID NO: 4196758 - RNA, 78 nt, Human
ggcaaaaaaugcaagaguaaauucaggacuuuaaggcuacugucuugaaguuaaagaagaguucauucugcacuuguc

SEQ ID NO: 4196759 - RNA, 70 nt, Human
ggcaaaauauagugugaugaaaucauuccuguugaaugacuaacaggaugagaauaucauauuuuuuguu

SEQ ID NO: 4196760 - RNA, 56 nt, Human
ggcaaacaccaggcgagggagcaucccuaaccagcucaaugugucugcuguuggcc

SEQ ID NO: 4196761 - RNA, 83 nt, Human
ggcaaacgggugguuucucugcagagccccaaggaucucaucucuuucugguuauguauagagaucuugccaacucuguugcc

SEQ ID NO: 4196762 - RNA, 80 nt, Human
ggcaaagcacagagccuggaggaaaacaacugcagacagaauccuuuguuuugguuuaauuucuucuacugcugcuuuuc

SEQ ID NO: 4196763 - RNA, 79 nt, Human
ggcaaagcagugggcaaggaugagcccuuagaaggccuucagagccuugcugaccaucaccuuugaacacaugcuggcc

SEQ ID NO: 4196764 - RNA, 66 nt, Human
ggcaaagcccugccugguucaagcuagagagaaacagaaagagcugaauuaaggaagggcugugcu

SEQ ID NO: 4196765 - RNA, 55 nt, Human
ggcaaagccuuacucuaacugaucaaaugaccaaucagcuggauucaggcuuuuc

SEQ ID NO: 4196766 - RNA, 60 nt, Human
ggcaaaggcuucuuugcaggcuuuaggcuucuguuuaaaguugcaaagacagccauuccc

SEQ ID NO: 4196767 - RNA, 72 nt, Human
ggcaaagguguucaaggaaagccugccugucaagaauuaggcagagcuggguuuugaaaugccaucucugcc

SEQ ID NO: 4196768 - RNA, 89 nt, Human
ggcugccagaggguccugggcacagggcaggccgggcuuccucagggaccccgcccuuggccucuuuggcccggcggaagaugucagcc

SEQ ID NO: 4196769 - RNA, 73 nt, Human
ggcugccagcagcugcaaauggaaacagcgggccacaugcagccucugccguugacagcuguggguggcaguc

SEQ ID NO: 4196770 - RNA, 69 nt, Human
ggcugccagggguggguguggucagugccaagagcuguccuuaccccaucacaucucaccacugcaacc

SEQ ID NO: 4196771 - RNA, 75 nt, Human
ggcugccagugggacccgcugugggcagggggauuucuucccagaguccaggcuaagucccuucugccuucagcc

SEQ ID NO: 4196772 - RNA, 68 nt, Human
ggcugccaguuugauucgggccacugugauauccuggccuaacagugcccugacacaccuggugugcc

SEQ ID NO: 4196773 - RNA, 81 nt, Human
ggcugccauccuucaguuaucacaguacuguaccuuuagaauagacagcaucagcacugugauaacugagccagggcagcc

SEQ ID NO: 4196774 - RNA, 91 nt, Human
ggcugcccgaccccagucccauggagaagacuugagcuugcugaauuauggacagcaggugucacuuucacuccaagacugggcucccacc

SEQ ID NO: 4196775 - RNA, 77 nt, Human
ggcugcccuagaaguacagagagcaguuguugcauaguuaagcgaaaaggcagcauuuuaugucugauagagcaguc

SEQ ID NO: 4196776 - RNA, 55 nt, Human
ggcugccgggugagggccgggcuggcucacucuuggccacuaccaccuggaggcc

SEQ ID NO: 4196777 - RNA, 128 nt, Human
ggcugccuggacucacugggcugggcugcagggugaggucagcauuugcugugagcucaucugagcugggagcucccagcagagcuggccacugcucuggccaccuugugcaggagcuggaggaaguc

SEQ ID NO: 4196778 - RNA, 90 nt, Human
ggcugccuguuuauucuucuagcucccugagaugccacagcaagcaggagcccugcuggugcauccucagggucaccaggggacaggccc

SEQ ID NO: 4196779 - RNA, 67 nt, Human
ggcugccuguuuggcaucauugguuguugccuguuuggcaucggccuugacaagcuuagcagcaguc

SEQ ID NO: 4196780 - RNA, 76 nt, Human
ggcugcggaaggcugccuggcuugagcaucuuaacagcgcccaaguuuaugguucagcagugcagccccggcaguc

SEQ ID NO: 4196781 - RNA, 55 nt, Human
ggcugcggccgcgggucugugcagcagccggugcagggaccguggaguagcagcu

SEQ ID NO: 4196782 - RNA, 75 nt, Human
ggcugcggcuguggagguaccaccuguggagaaacugcaaagaugcugucugugugugucuccgcggccguagcc

SEQ ID NO: 4196783 - RNA, 72 nt, Human
ggcugcgucgagacagccuggcaccccaggggucaccauggaggccuugcccugcuguggcucugcccagcc

SEQ ID NO: 4196784 - RNA, 61 nt, Human
ggcugcuccuuuacccuggcagcaggauaagaagauguggugcacagggcccaggagagcc

SEQ ID NO: 4196785 - RNA, 114 nt, Human
ggcugcucggcaccuggccucagcaggugaacaucaugccagauuccuugucagauucaaggccaagugggugaaugucaugugcaguguugugccagguaugugccgggagcc

SEQ ID NO: 4196786 - RNA, 79 nt, Human
ggcugcugaugaguccuucuaucgcaggcugcagcaguccugaagguugauggagggccaugcuauucaaacagcaggc

SEQ ID NO: 4196787 - RNA, 64 nt, Human
ggcugcuggccagccuaggaguggguccccucaggucagacacacccugggcaggucagcagcc

SEQ ID NO: 4196788 - RNA, 81 nt, Human
ggcugcugggagcuaggcugggcaggaaauaugcagaugagcgaagauuugcacauuucuuagccuaguuccaguccagcc

SEQ ID NO: 4196789 - RNA, 111 nt, Human
ggcugcuggguggagacgaggcaugugggaugcugcacugagcucucuagggcauaggagagcaggccagccgucccagggagcagugccugugccuccuccagugcagcc

SEQ ID NO: 4196790 - RNA, 55 nt, Human
ggcugcuguaauuuuguuuauaccacagguuggguggcguaaacagcagacaguu

SEQ ID NO: 4196791 - RNA, 94 nt, Human
ggcugcuuuagauuuuuaugucucuaagauucuuggucugguauugggugggaugccagggcauguccaagacuuagaaaagaucaccauaguc

SEQ ID NO: 4196792 - RNA, 63 nt, Human
ggcugcuuuggcuggggcccuacuuucuugcugaaggcuggcuucccucaggucugagcaguc

SEQ ID NO: 4196793 - RNA, 69 nt, Human
ggcuggacaagcuuggucuuccgccaugcugcucacacagaagcaggcucacgccaggcagugccaguu

SEQ ID NO: 4196794 - RNA, 92 nt, Human
ggcuggacauggcuuaugggcuacgguuugcugauccuugacuuagaucuaagcugcaaccuuagcuauaggcuuauuuuugaguuccagcc

SEQ ID NO: 4196795 - RNA, 113 nt, Human
gggaaggaaggaggugccaagcccuccgcucaguggaggucaguggagguuugcuuccugcucacacugggccugauugggucggagggcacgcgggggccgcugucuguccu

SEQ ID NO: 4196796 - RNA, 130 nt, Human
gggaaggcauaauuguguuuugaaaugugagaaacaggagauuugggagggaccagggguagaaugauauagucuggcucuguguccucacccaaaucucaucuugaauuguaauacaaauuauaauccc

SEQ ID NO: 4196797 - RNA, 86 nt, Human
gggaaggcggacagggcuguaagagguuuggaggcugguggccguguuguuuggguccuugugucucuauggcccugccccuuucc

SEQ ID NO: 4196798 - RNA, 75 nt, Human
gggaaggcggggucagcugagggcagccuccuaggucugacucaggucuagaggauguuccuuuccugccuuccu

SEQ ID NO: 4196799 - RNA, 64 nt, Human
gggaaggcuuccuggaggagguggccucccagagcucagcuuguccuuccuugagguccuuucc

SEQ ID NO: 4196800 - RNA, 62 nt, Human
gggaagggaguggcagggugagagcaggcaggacugaugagacuuugggcacuuuccugccc

SEQ ID NO: 4196801 - RNA, 65 nt, Human
gggaagggcuuucugggagaagagacacuuaaaacugaguccucuggacugaggaggcuuuugcc

SEQ ID NO: 4196802 - RNA, 81 nt, Human
gggaagggggaggaaugaaguauccuaaguagcaaccauggcugcgcugcuggaggccugacuguguuucuuucccuucuc

SEQ ID NO: 4196803 - RNA, 99 nt, Human
gggaagggggccgcugugccgcugagaguucguuccacccuccuggcagugcuggagggggcuggagcucuggcgucuggccuagugacccuaccuccc

SEQ ID NO: 4196804 - RNA, 61 nt, Human
gggaagugagcuggaaucaagggcacaauuuggccaccuacauaucuggaccucacuuucc

SEQ ID NO: 4196805 - RNA, 60 nt, Human
gggaagugggcuuuguggucagcuuccauagugaaaaguugguucucagagccccuuccc

SEQ ID NO: 4196806 - RNA, 72 nt, Human
gggaaguugaaauuccaggagaguuaaaauaccccuuuauacggguguuuuaugcuuauggaguuuuauccc

SEQ ID NO: 4196807 - RNA, 80 nt, Human
gggaaguuuagagguuggggacuuugcagguuagggacgucacauaaaggcuucagaggaaacaaucuuuaguacuuucu

SEQ ID NO: 4196808 - RNA, 74 nt, Human
gggaauagcuaccuuuauggagaacuugggauguauuauacaagaugcuaagugcuucacaaauguuaucuccc

SEQ ID NO: 4196809 - RNA, 70 nt, Human
gggaauaguucaggguuauuucaaggucagauucacuucaugaucagaaacguuaccuagggcuguuccu

SEQ ID NO: 4196810 - RNA, 77 nt, Human
gggaauauagcaguugguuagaacaaacaauuuucuuaaauaggaaauguacuuuaaagccauccugcugugauccu

SEQ ID NO: 4196811 - RNA, 83 nt, Human
gggaauaucguugcucauguaguauguaggguuggagagcacaaccacugucuggucugucccacucugcccuugagcuuccu

SEQ ID NO: 4196812 - RNA, 73 nt, Human
gggaaucaggacagugaaugagaauggagaaaugggaacaaaugcauuuaguauucucuauuuccaucuuccc

SEQ ID NO: 4196813 - RNA, 100 nt, Human
gggaauccgauuuucccagguccagccaggugcucaugccugggaucauucagcuaugauuggguuggcagagacuggguuggcagaggaagggguuccu

SEQ ID NO: 4196814 - RNA, 113 nt, Human
gggaaucugggagcccuaaggggcagcucuucccucuucuuguaggcaggacucagguucucacugcagcuuaagggagggguugccugugugaucgcugacccuggagucuc

SEQ ID NO: 4196815 - RNA, 79 nt, Human
gggaaucuuugggauccugauuuacucuagaauacaacuuuggcuaaauugagaaguaggugcagugacucgaagaccc

SEQ ID NO: 4196816 - RNA, 56 nt, Human
gggaaugaagucuagcaagcauugaauuuuuaaguuugcuuuucugauuuuuuccc

SEQ ID NO: 4196817 - RNA, 56 nt, Human
gggaaugagggagccggcagugaauuuucaugaggcaaaggcuucuuuuauucucc

SEQ ID NO: 4196818 - RNA, 60 nt, Human
gggaaugggagguggccugucucugucucugcguggagagacacugccacuucuguuccc

SEQ ID NO: 4196819 - RNA, 64 nt, Human
gggaauggucacuuugggaacugggagcuuagcacacuaggcuccaagucucagagugaagccc

SEQ ID NO: 4196820 - RNA, 107 nt, Human
gggaaugguugauacaugacaugugacagcaggauuacuuuaucagguaaaggaauuacuaaaugaacuauuaauacuuggaguuauugagucagguuaaaguuucc

SEQ ID NO: 4196821 - RNA, 67 nt, Human
gggaauguguauacuggcaauuaagauuguuaguacuuaacugacuuccuccagaauacauguuccu

SEQ ID NO: 4196822 - RNA, 62 nt, Human
gggaauguuuuuauaaguguuacauugucauacaggcuguaucuuagugugaaaauauuucu

SEQ ID NO: 4196823 - RNA, 98 nt, Human
gggaauucugagaugugguaggauagugacuuauaugcauuuuuaagaucauaugcaauauuagaacaucauuuugcaacuuaaaaauuauaauucuc

SEQ ID NO: 4196824 - RNA, 62 nt, Human
gggaauuuaugagaauaauuaguuuuguguugcuuauauuagagcugguuaucuuaauucuu

SEQ ID NO: 4196825 - RNA, 66 nt, Human
gggaauuucuuucaaguuuugacuuaaccccaguauugagccaaugauuugaauagagcagguccu

SEQ ID NO: 4196826 - RNA, 71 nt, Human
gggacaaauaggucaacaggagggauuggcgccgugcaugucauaaaaccccuccaggccugucauguucc

SEQ ID NO: 4196827 - RNA, 95 nt, Human
gggacacacugguccaguugcuguuguccaucuguugccauaagaacaaaaagaauuaguucuauagacuuggacauauagucacuguugugccc

SEQ ID NO: 4196828 - RNA, 92 nt, Human
gggacacaugccaccucugcucacauuucauuggccaaagcaagucacauggccacccccaaugucaguagggugggaaauaugauuguccu

SEQ ID NO: 4196829 - RNA, 88 nt, Human
gggacacuccaggcaguggcuugucccaaggugcuggaacauucugaccagccagugggauuagagccucuauaaccugggugcuccc

SEQ ID NO: 4196830 - RNA, 64 nt, Human
gggacagaaggaagugagcacacggcacacccgcuguuggauugguugcuauuucucccguccc

SEQ ID NO: 4196831 - RNA, 96 nt, Human
gggacaggcaaagaggaagagagcucugccuuguccugucuccucugcuugugacuuggacaaggcagagcgcuuuucaggagguugcaugguccc

SEQ ID NO: 4196832 - RNA, 84 nt, Human
gggacaggguaguucuagagcucugcuacucaaaguaugguccuuggccucacaguuucacaguguagauaugcccucuguccc

SEQ ID NO: 4196833 - RNA, 107 nt, Human
gggacaggguuuuugcugcccggggccuagucuaccucggcacgcuuuucucugaaggagacacgcacuugcacgacgugggccucugugcagcucuacuuuguccu

SEQ ID NO: 4196834 - RNA, 75 nt, Human
gggacaggucugguuuccuucaggcacaacuggauucauggaucguaaugcugccuuugggaccuggccugucuu

SEQ ID NO: 4196835 - RNA, 58 nt, Human
gggacaggugcuaagggaccuggcaggcagggcuggcaggccccauggcgccuguucc

SEQ ID NO: 4196836 - RNA, 55 nt, Human
gggacaggugggccaugaaaaaugaccaucaccuuggcuauaucacccccguccc

SEQ ID NO: 4196837 - RNA, 94 nt, Human
gggacauggagccacacugcccuaacagugggcuggggucugccuccuggucuacacugcauuggggaugcuuugacagggugcuucauauucc

SEQ ID NO: 4196838 - RNA, 105 nt, Human
gggaccaagaucuagaaagagggggcaugaaaugagccuggagaugcauguggugacauguuuccucuaaacgcauuugcuuaucuucauuagaucuagaggccc

SEQ ID NO: 4196839 - RNA, 101 nt, Human
gggaccacacacagauccccgauuucaguaaggauaauaaacagaccuacguggagugagggugugauauuuucuuauugaaguugcuguguuuuugugcc

SEQ ID NO: 4196840 - RNA, 130 nt, Human
ggcauuuuuaacaucuggguggugacccugcugccaucagaguucaggaauugcugagaggagaagcagcaccuguucccugggucucugcaguggcagcagcugagaugguaauaggugugcugaugcc

SEQ ID NO: 4196841 - RNA, 71 nt, Human
ggcauuuuuauuggaauuucacugacucuacugauuaauauaaggagaacugacauuuccaauauaaagcc

SEQ ID NO: 4196842 - RNA, 86 nt, Human
ggccaacaggaguucaaggcucuggaccaaaucccaucacuaaauugcugugggaucuugaaucaguggcacaagauuugggggcc

SEQ ID NO: 4196843 - RNA, 62 nt, Human
ggccaagaaacuauuuauuguggguauccaggcugugucuguaugcacaaaauauccuggcc

SEQ ID NO: 4196844 - RNA, 60 nt, Human
ggccaagagacacuguguacagaaaaagaaaccaauuuccuggcggcacugucuugggcc

SEQ ID NO: 4196845 - RNA, 63 nt, Human
ggccaagauggaaggagagauggccguucguccagcucccagccucucuccaucucaguggcc

SEQ ID NO: 4196846 - RNA, 68 nt, Human
ggccaaggaugguggcucugguaaaucucauacucuaguaauggagcuccccaggcuacuucuuggcc

SEQ ID NO: 4196847 - RNA, 79 nt, Human
ggccaauccauauauauaguuuauauagaaugucucuuuacaauaacuguaugcaauaauaacuauguggcuguuggcu

SEQ ID NO: 4196848 - RNA, 60 nt, Human
ggccaauggcagagccuugccaaacucccgacacggcuguacaaggccucugccaucacc

SEQ ID NO: 4196849 - RNA, 55 nt, Human
ggccaaugugcuccacgccagagcccaugugcucuauggucuggcccacaugguc

SEQ ID NO: 4196850 - RNA, 104 nt, Human
ggccacaaggacagauuccugggagagcugcccgggugauugcccuuacuguggucacacugaauggcacugacauucccagguaccuacacucuuuucuggcc

SEQ ID NO: 4196851 - RNA, 65 nt, Human
ggccacaauggacuggaccagugaguuaaggguaacuuuugcuuuacuuugccauucguugggcu

SEQ ID NO: 4196852 - RNA, 97 nt, Human
ggccacaguuuacugguguaugaagcuauauuguuggcuguauuguuacucuggcagagcuguagacuucccuaucccagugguauuagacuuggcc

SEQ ID NO: 4196853 - RNA, 80 nt, Human
ggccaccacugaucuguuuccauacagguuuuuggauauuucuagaauaucauaugaagagacucacuuaguauguggcc

SEQ ID NO: 4196854 - RNA, 82 nt, Human
ggccaccucuggcaccacugagucugcaguuaguucucacccaccacgcccugccugaccucagugucugcuucaggcugcc

SEQ ID NO: 4196855 - RNA, 69 nt, Human
ggccaccugcgggccgugguggagaagggccaggguacgguauugcuccacaacagugugccuguggcc

SEQ ID NO: 4196856 - RNA, 68 nt, Human
ggccacuaugcaggugcuggggaugcgauggccauaaaaacugacaugcuuccacagagcuugcagcc

SEQ ID NO: 4196857 - RNA, 99 nt, Human
ggccacucagaggggaucugagcucugggaguagggccaguguucuccuagcagaguugggagccuggcuccuaagagcacaacaccucugucugugcc

SEQ ID NO: 4196858 - RNA, 83 nt, Human
ggccacugccaacuucucccugaagaaacaaaaacacaugauuaguugaccauucucaggguagaggugacacuggcauggcc

SEQ ID NO: 4196859 - RNA, 76 nt, Human
ggccacuuaccucccagagaugcugcguguuccucacggcgccugccugcaccuucucugggggcagaagcacgcc

SEQ ID NO: 4196860 - RNA, 76 nt, Human
ggccacuugaccccccauccucacuugcggccacacagcacgugucacaggacccugaggguggcggggccaggcc

SEQ ID NO: 4196861 - RNA, 61 nt, Human
ggccagaaaguuaagcuguggcccuucagaguuuuauagggcccagcacaaucuucuugcc

SEQ ID NO: 4196862 - RNA, 58 nt, Human
ggccagaggaccucucauagcccuuuuagguuguggauggaccuuccuucuguuggcc

SEQ ID NO: 4196863 - RNA, 74 nt, Human
ggccagaggagaagguggaaaccagaagagcacucacugcugcucagacucuggccacuugcuucacacuggcc

SEQ ID NO: 4196864 - RNA, 63 nt, Human
ggccagaggucuccugcacgggaugugccuucucaauauccucucagggccaguaccucaccc

SEQ ID NO: 4196865 - RNA, 70 nt, Human
ggccagcaaaagagggaaacagauggguugugggagaugacccugcccccaugcuguuuuuguucuggcu

SEQ ID NO: 4196866 - RNA, 60 nt, Human
ggccagcugccaccagcccuauggugugaauggcaaggaaguggggacuggcggcuggcc

SEQ ID NO: 4196867 - RNA, 61 nt, Human
ggccagcugccugaccuucuguucagugacccuuuuuguacaaagucaaauugcagccgcc

SEQ ID NO: 4196868 - RNA, 62 nt, Human
ggccagcugugggauuuucugcuuggguguaagcaaugggcagguaagggacacaccuggcu

SEQ ID NO: 4196869 - RNA, 68 nt, Human
ggccaggaaggccuggaugcccccugccuacuaagucccuggcucgggggaggaagagccguccugcc

SEQ ID NO: 4196870 - RNA, 101 nt, Human
ggccaggacaugcaagcugauuuuccagaaagaguagcccugggcgggaaggaccccagguggugcugaauucuggaggaggcuggucugucuuggacacc

SEQ ID NO: 4196871 - RNA, 62 nt, Human
ggccaggaccugcuuuguaaaauagacauaaauacauuuuaugcuuacaaaauaucuuggcu

SEQ ID NO: 4196872 - RNA, 64 nt, Human
ggccaggagaggagggcacugauagggacugaauuagaaccccgguucucgccucugcugcucc

SEQ ID NO: 4196873 - RNA, 65 nt, Human
ggccaggaggggacagggcugugucgccccauguggguggggcugggcugugcccuuccguggcc

SEQ ID NO: 4196874 - RNA, 57 nt, Human
ggccaggaggggcguccugagugggccuguggaaugggccccgcguccugccuggcu

SEQ ID NO: 4196875 - RNA, 93 nt, Human
ggccaggauggucucgaucccccgaccuugugauccacccaccuuggccucccaaaguguugggauuacaggugugagccaccgugccuggcc

SEQ ID NO: 4196876 - RNA, 93 nt, Human
ggccaggaugguuucugucacuugaccucgugauccgcccuccuuggucucccaaagugcugggauuacaggcgugauccaccauaccuggcc

SEQ ID NO: 4196877 - RNA, 67 nt, Human
ggccaggcuggucucagacuucuguccucaagugacccacccaaagugcugggauuagucaugagcc

SEQ ID NO: 4196878 - RNA, 56 nt, Human
gggcauggccaggugagggguccaugcagaguacaugacccagcaaggccaagucc

SEQ ID NO: 4196879 - RNA, 86 nt, Human
gggcaugggguaaacuacuuacagucuggauuaggaaacauagaaacgaauuuauuaauuaaugugccagauugugucuagugucu

SEQ ID NO: 4196880 - RNA, 57 nt, Human
gggcaugugaucuuucaggcaaaucaaccaaaguaaugcuggaaugagaacaugccc

SEQ ID NO: 4196881 - RNA, 78 nt, Human
gggcauucucccucuaugugugccugcguccagauuucuucuccuuaucaggacaauggucauacuggauuagagccc

SEQ ID NO: 4196882 - RNA, 69 nt, Human
gggcauugucacagaggcuuugcgggucaggccucuggacucgagucccuggcccacauggcuucuccc

SEQ ID NO: 4196883 - RNA, 55 nt, Human
gggcauuguggguaagaggaaacgcuggggccggcccgcucccccccacgugucc

SEQ ID NO: 4196884 - RNA, 68 nt, Human
gggccaagagcugccuggauucaaagcucaugugagcacaugcagacgggauccuggcaguuacaccc

SEQ ID NO: 4196885 - RNA, 82 nt, Human
gggccaagcuggccucucagaccaaacuguccgaugcaaaucuagaauccccagaggguggaggccaggcucuacuaggccc

SEQ ID NO: 4196886 - RNA, 62 nt, Human
gggccacaguguucuuuuuaaaauuuguugagaugccccuugaaagaaugcuguguauuccc

SEQ ID NO: 4196887 - RNA, 79 nt, Human
gggccacauaacaaccucuaucggucaggaagccuuugaucugggccaggcugccgacccacagggguuaauugugccu

SEQ ID NO: 4196888 - RNA, 56 nt, Human
gggccacaugacuugcuguagcacccuguaaggacagcacccaugucaucuggcuc

SEQ ID NO: 4196889 - RNA, 63 nt, Human
gggccacuauuuauuaacaggauugcuacuuauggggcaauucuguguuaggauagauggucc

SEQ ID NO: 4196890 - RNA, 75 nt, Human
gggccacuuccaggaugggcuguccuacucuguuuucaagaccaucacagaccagguccuaauggguguggaccc

SEQ ID NO: 4196891 - RNA, 55 nt, Human
gggccagaccucuucucagggaagaccgcgggugucagggaagaggaucuggccc

SEQ ID NO: 4196892 - RNA, 71 nt, Human
gggccagccgcacugggccucauuccuggagggcccugucucucggcaguguugcuaggugcggugagccc

SEQ ID NO: 4196893 - RNA, 60 nt, Human
gggccagcucugugauguaggggaagaaaaauauguuccuucuacccuucuaggcugccc

SEQ ID NO: 4196894 - RNA, 69 nt, Human
gggccaggcaaagcccaugcaagaguguguggaagugagcuggagcccucuucagggcuuguguggccc

SEQ ID NO: 4196895 - RNA, 88 nt, Human
gggccaggcuaaggguggcucaguuccaucaucuggaggucagacacacuguccagaggcagaacugaagcccucucggccccuaccc

SEQ ID NO: 4196896 - RNA, 74 nt, Human
gggccagggcagcacucccaggagaaccagcaucuucaugugccaggguccccuugggaggugagucugggccu

SEQ ID NO: 4196897 - RNA, 80 nt, Human
gggccaggguguagggauuccagauggaagcaaaagacacacucaccaucuggauaggaaccucugcuugacccaggccc

SEQ ID NO: 4196898 - RNA, 68 nt, Human
gggccagguaucgucuuuaguagcuuauggaaaaugugccagaccaauggcugagggaugccugguuc

SEQ ID NO: 4196899 - RNA, 60 nt, Human
gggccaguucuccgccucuuuuaacuuuacugccaaggcaggagagggguggaguggccu

SEQ ID NO: 4196900 - RNA, 62 nt, Human
gggcccacagggccuggggcagcugcucaauuggcagcuggggcagugcccugugaaggcuc

SEQ ID NO: 4196901 - RNA, 80 nt, Human
gggcccaccagugucaccccaaccaggacaacuggaccgucagccagauccugggcgaguggugguacacucuggggccc

SEQ ID NO: 4196902 - RNA, 99 nt, Human
gggcccagagaguuuuugcuccaucagccaggccuuugggcaucuaacgcccugccuggagcauucugaagguggcagaggccccuggucucagggccc

SEQ ID NO: 4196903 - RNA, 89 nt, Human
gggcccagcucaugaccuuuguuaucuucagaugaugcuagcauuggcugcaaggagaaggauagagaacaaagaucauagcugugcuu

SEQ ID NO: 4196904 - RNA, 68 nt, Human
gggcccaggggcacugccgggcauggccacccugcgccguuugcugggcagugugcccucgagggccc

SEQ ID NO: 4196905 - RNA, 62 nt, Human
gggcccaguggggguugugucucugggcagagagcuuccccaguggcuguccccaugggccc

SEQ ID NO: 4196906 - RNA, 85 nt, Human
gggcccauggcuccuagcuuagggaagggagcacugggauucccucaguccacagucucacuucuugagcuaugcuguaggguuc

SEQ ID NO: 4196907 - RNA, 58 nt, Human
gggccccacuggggcugccugcacccagagacgaugccggcgggaucucagagggccu

SEQ ID NO: 4196908 - RNA, 62 nt, Human
gggccccaugguuauauguacacacugugauccugugagucugcauguguggcuuggggucc

SEQ ID NO: 4196909 - RNA, 84 nt, Human
gggccccccugagaaaggcugcaucucgccucagacugggaccccccugaggauggggcugugucuccccucagacuggggcuc

SEQ ID NO: 4196910 - RNA, 90 nt, Human
gggccccuuuugcagacucggugccuggcaugcgccggugcugccugcugggucuuggcaccacuggcgcagccacggcggcgggggccu

SEQ ID NO: 4196911 - RNA, 85 nt, Human
gggcccgcacuguccagccggagucgguuagagacccucaggaggcucacaggcuccagggccuggauguuaggaugugaggccu

SEQ ID NO: 4196912 - RNA, 60 nt, Human
gggcccggcgcaagggguggcugggaaggggcgcucaguguccaccccuuugcugggccc

SEQ ID NO: 4196913 - RNA, 58 nt, Human
gggcccggggaugcuacacuccgccguucccgucgacccugugguuucccggcggccu

SEQ ID NO: 4196914 - RNA, 78 nt, Human
gggcccuacgggugcgcgcuucgguccuggaggccuuauccaagccuccucuccaucagcgccacccgucuggggucc

SEQ ID NO: 4196915 - RNA, 75 nt, Human
gggcccucuguuagggagcuccacugccucucauucugugcgcagaaagaccgugguuguggagcuagagggucc

SEQ ID NO: 4196916 - RNA, 75 nt, Human
gggagacugcggcuggagcuuugaaccugaucucucaaccucgacaggacaacucagcagccagcagcggcuuuc

SEQ ID NO: 4196917 - RNA, 62 nt, Human
gggagagaauaaugaacgugagacaaucauuacaucaccuuuuccuguacauuauucucccc

SEQ ID NO: 4196918 - RNA, 76 nt, Human
gggagagccagggggccaggagugucccacucauuuuccaggagaugcaaaaucacccugucuccguggguuuccu

SEQ ID NO: 4196919 - RNA, 91 nt, Human
gggagagugaccauggccaaggacaccgcuaggggccucacaagccaaagaugugagucuccuacuggcuguccuuaccccaucacucccc

SEQ ID NO: 4196920 - RNA, 73 nt, Human
gggagaugauauugaggauugaggaaagcacaccgccaggaaggguguucccucugccaucaaauucucaccc

SEQ ID NO: 4196921 - RNA, 117 nt, Human
gggagaugaugggaguuuugaugaggccaugagguaggguccuuaugacaggauuagugucuuuagaagaagagacaucagagggcucacaugaucucucuuucucccucuucucuc

SEQ ID NO: 4196922 - RNA, 77 nt, Human
gggagaugccagcaguagcaguaggccauggaaccagcaugcaaggagugggcugcuucuauugguggucuacuuuu

SEQ ID NO: 4196923 - RNA, 62 nt, Human
gggagauguggggacaaaaugauggccaugugccugugccguccucucuccccaccucuccc

SEQ ID NO: 4196924 - RNA, 76 nt, Human
gggagauugagcaggaacuagaagauagcagaaccagcauucaaaguggacuucagaguucaugcuugugacuccu

SEQ ID NO: 4196925 - RNA, 82 nt, Human
gggagauuuccugaagucaaagaucuaaacccaaaaucuaaaaacauaugaguaaagaguuuugcacuuagggggauuacuc

SEQ ID NO: 4196926 - RNA, 81 nt, Human
gggagauuuucugugugcugucuuggcuuucuuuguuuccuaggcuauagguaagaguuaagacguacaugagugucuucu

SEQ ID NO: 4196927 - RNA, 55 nt, Human
gggagcaaggugagaaaugggaaaggaccagcuugaacacauuuaccuggcuccc

SEQ ID NO: 4196928 - RNA, 106 nt, Human
gggagcaaguucauaccuaccugccuaucagcugccugcuucuuaucauggagaugucagggaggacacuugauauggaucagaccacugguuuggaugucaaccc

SEQ ID NO: 4196929 - RNA, 88 nt, Human
gggagcaccauugucgcguguccagaugaggagacgauguguugcacacagcauugucugccauaucaggaacgugcuggcugcuguc

SEQ ID NO: 4196930 - RNA, 65 nt, Human
gggagcagagacaguacaacuggcaaugugagaguuaccuucccgccagugcugucugugugauc

SEQ ID NO: 4196931 - RNA, 67 nt, Human
gggagcagcagguggcugugauggccuugccccuccugucccugaaggcccugccugccacgcuccu

SEQ ID NO: 4196932 - RNA, 75 nt, Human
gggagcaggaugggagugggguggaaagucccuuauuagccuggaggcugggaugcccugacccucuggaauccc

SEQ ID NO: 4196933 - RNA, 76 nt, Human
gggagcccgggguaggcccugaggcagcucugcuccccccucagggaggccucagccugcccugaacacuggcccc

SEQ ID NO: 4196934 - RNA, 57 nt, Human
gggcgagggcgaaagcgagagccaggaaagcccgggcucucgcuguaagccccgcgc

SEQ ID NO: 4196935 - RNA, 57 nt, Human
gggcgaugcggagcgcuggccaaggcggcgagaguuggcgcaggcuucgggucgcuc

SEQ ID NO: 4196936 - RNA, 55 nt, Human
gggcgccgguccauggggccagccgaacuaccugcuuaguccuaacuggcaguuc

SEQ ID NO: 4196937 - RNA, 77 nt, Human
gggcgcgcaggacggccggucccgggacucucuguccagcaccucgggguccuggcugccgucguccugcggggccu

SEQ ID NO: 4196938 - RNA, 67 nt, Human
gggcgcuggagagacauugcaggagacgaguuucccuuccugcuucugguguguucucucuaggcuc

SEQ ID NO: 4196939 - RNA, 87 nt, Human
gggcgcuguuucuggguccugcauugggagugguaccggauacucaccaggagccaucaggaguccagagacaucacaguucugccc

SEQ ID NO: 4196940 - RNA, 79 nt, Human
gggcggauagcuaauucugagagucagggauagugguaaggaggacauaacaauuuggcuaagauuuaaauguuugccc

SEQ ID NO: 4196941 - RNA, 62 nt, Human
gggcgggacugcggcgaaggggaccccggcccgaccccaggcgccacccuccgcggcugccc

SEQ ID NO: 4196942 - RNA, 72 nt, Human
gggcgggcaguggguggcugcagccuguccuuacauggggcuaaaggggcccagccacuuagugacucaccc

SEQ ID NO: 4196943 - RNA, 91 nt, Human
gggcgggcggaggacgugcacgcacgcuggguggaggcgcaggggucacagguucuggcagcacugcagcuuguugggcuucuguccgucc

SEQ ID NO: 4196944 - RNA, 90 nt, Human
gggcgggcggcuacuuaaggucggcgacccgaggccgcggcugccgacuggguccccugccgcugucgccaccauggcuccgcaccgccc

SEQ ID NO: 4196945 - RNA, 118 nt, Human
gggcggggcggggcggggcugggguccuggcccuggaauagggcagguguucucugaggagcugcuucuguuccuguccuaagggccaauggccucagcaccucuccgauucccuccc

SEQ ID NO: 4196946 - RNA, 62 nt, Human
gggcgugccauuugacagagcaggagccucgaucuggcucugcucccucaaaugacaugcuc

SEQ ID NO: 4196947 - RNA, 66 nt, Human
gggcuaaaggcagucaguuguuuugaaauacaauaguacuuucaggucuagaccugccauaagucc

SEQ ID NO: 4196948 - RNA, 70 nt, Human
gggcuaagaagucaggggacagagguuccaggcccaauaccuucucuguccaccuuggcugacuuaacuc

SEQ ID NO: 4196949 - RNA, 97 nt, Human
gggcuaaggcugaaaucuaagaggaugguuggaaauaagggauauauuuuuaaauaucagggucauuuuagaccagcuucuauagaaacuagagccc

SEQ ID NO: 4196950 - RNA, 57 nt, Human
gggcuacagagaugcaucuucagcaacuggaauagaugaaagugucucuuaaagccc

SEQ ID NO: 4196951 - RNA, 79 nt, Human
gggcuacagguauagguuuggcucucuccaggugguauuugaggcccugggagugacugaaucuauaagagugagaccc

SEQ ID NO: 4196952 - RNA, 67 nt, Human
gggcuacugcacagucauuuccucucaaugcacuauuuacauugucaggaacuaugauuaugccccc

SEQ ID NO: 4196953 - RNA, 95 nt, Human
gggcuagugucuccuuacugaagggccaggggcaggcuggaaggcaggguccccaguccaguggcaccuuggcccucagcaguaagcaccaguuu

SEQ ID NO: 4196954 - RNA, 58 nt, Human
gggcuauaguuuuagcaguggcuguauuuuucugcagccacagcuggucucugagccc

SEQ ID NO: 4196955 - RNA, 66 nt, Human
gggcucaccaggcagcacuuuccuugcagggcucccuguggauugccauggcugcuaggagagcuu

SEQ ID NO: 4196956 - RNA, 66 nt, Human
gggcucagagcauuuggguuggagugugcugcuccagccuucauuuaagguguagugauuaugccc

SEQ ID NO: 4196957 - RNA, 58 nt, Human
gggcucaggccuggccucucacuguccuuaugcagagggggggucccagcuugagccc

SEQ ID NO: 4196958 - RNA, 61 nt, Human
gggcucagggaugccugagaguaggcuuuggccauucugagcaccuuauauucuugagccc

SEQ ID NO: 4196959 - RNA, 72 nt, Human
gggcucaggugauccuaccaccuuggcuuccccaaaugcugaaauuacagcguaagucacagcgccuggccc

SEQ ID NO: 4196960 - RNA, 65 nt, Human
gggcucaugcuuugggucagaaaugccagggggccaccacuguguguuugcccacagcagacccc

SEQ ID NO: 4196961 - RNA, 58 nt, Human
gggcucauguguagccucauuguccucuuguaaaggggggauaggcagccaugagccc

SEQ ID NO: 4196962 - RNA, 64 nt, Human
gggcuccagccacuggcugaggcaucaguaaguugguucuuccccucgccggugcugcaggccc

SEQ ID NO: 4196963 - RNA, 55 nt, Human
gggcuccagggcccgagucgucccgcccggguacgcccucgcauccugagagccc

SEQ ID NO: 4196964 - RNA, 56 nt, Human
gggcuccaguuuggccaggaagagauuuucuuuucuuaucugugggccaggagccc

SEQ ID NO: 4196965 - RNA, 62 nt, Human
gggcucccagccugguggacagaaggacaaggaagccgacuugugccagggauggggagccc

SEQ ID NO: 4196966 - RNA, 114 nt, Human
gggcucccccaagggauccucgggauugaguuauuucuguuuuugcucaccugugccuggcccuggggacagagacaggaaucagcugcagucccugccucccuggaggagcuc

SEQ ID NO: 4196967 - RNA, 109 nt, Human
gggcucccccagauaacccuguaggucuggacccuccuggagugggcucaggggccuggguuuccacuccacaggauggguccagcugccccggcauuuguggcagccc

SEQ ID NO: 4196968 - RNA, 79 nt, Human
gggcucccuaaggaccugcucucccaguucucuacucuucccucugaggcagaggcugggcaggacccacaggcagccc

SEQ ID NO: 4196969 - RNA, 67 nt, Human
gggcucgcaugcagagaauaccugugauccagugccagcuuucaucaccgcuuugcauagccagcuu

SEQ ID NO: 4196970 - RNA, 72 nt, Human
gggcucgcuuagauuuuccucugacgcaacaauuuacagaauccacuguugauuuagggaucuggggagccu

SEQ ID NO: 4196971 - RNA, 75 nt, Human
gggcucgggcucuggugcugggaggaccucgcuggcaggcucgugcagggcccuccuaacaucucugcccagccc

SEQ ID NO: 4196972 - RNA, 96 nt, Human
gggcucuccagcacaccuggauguggaggugugaugcagagugguggcugcucgugacacucauuucaccccuuucugugcaggugccagaagccc

SEQ ID NO: 4196973 - RNA, 94 nt, Human
gggcucuggaugaguaagagccaaggccucagucucaaccguaaaaugacaagcugguucuggggcuaaauggcacugccuaaauccagggcuc

SEQ ID NO: 4196974 - RNA, 62 nt, Human
gggcucuguguucuagcucucgacucgugcagugggagaagagucuuaauauacagcggccc

SEQ ID NO: 4196975 - RNA, 56 nt, Human
gggcucuguuuagaccagagaucagcaaacuaugguccgugggccaaauacagccc

SEQ ID NO: 4196976 - RNA, 56 nt, Human
gggcucuguuuagaucagagaucagcaaacuaugguccgugggccaaauacagccc

SEQ ID NO: 4196977 - RNA, 60 nt, Human
gggcucuuuucacaguccaaaaugauuuggcuuaaacguuuccaacugugaugagguccc

SEQ ID NO: 4196978 - RNA, 76 nt, Human
gggcugaauauauuuuuaugggagaaauaaaauggauaguuuuaaacuugaauuuaguuuuuccuaauggaggccc

SEQ ID NO: 4196979 - RNA, 55 nt, Human
gggcugaccaaugccuugcuuuggaaaacagaauauggaggaagugagucaguuc

SEQ ID NO: 4196980 - RNA, 62 nt, Human
gggcugagaaguugaucccaagguucucuggcuuggcucuugguuugaaguucuucuagucc

SEQ ID NO: 4196981 - RNA, 73 nt, Human
gggcugagcaugugcuagggucugagacagguuaaauagguaaucugcuguuucaaaacuaguacaacagccc

SEQ ID NO: 4196982 - RNA, 62 nt, Human
gggcugagccacagcuuuuguucugauggcgaccaggcguagagggccggggcuccgggccc

SEQ ID NO: 4196983 - RNA, 81 nt, Human
gggcugagcugucuucaaagcucucaguccauauccugaguuauuugauucaggcaggcucagaggaaaacagaaaagccu

SEQ ID NO: 4196984 - RNA, 72 nt, Human
gggcugagggaggcugaacugaguuggagaccguacaccuuguccugaagggagcagccucuacucagcucc

SEQ ID NO: 4196985 - RNA, 95 nt, Human
gggcugauauuuacacaguuaccagcagguggcaguauguauaugaaagugugucguaaauaaugcaacuugcagguuacuggcuauuacuaacc

SEQ ID NO: 4196986 - RNA, 63 nt, Human
gggcugaugugacagaacucuccccauuaacaugcuguuggguagcaguccuucacuuagccc

SEQ ID NO: 4196987 - RNA, 73 nt, Human
gggcugauuguguuccugggagcuggaagcuguuacugcaggguuaaaucagcaacaggagagcaucacuccc

SEQ ID NO: 4196988 - RNA, 63 nt, Human
gggcugcacguauucugcucacagcucacauuccaaugaagugugacuagggagugugggucc

SEQ ID NO: 4196989 - RNA, 58 nt, Human
gggcugcacuagggcaaggugaccacccuacuugguaaagaccugauuggcgcagccc

SEQ ID NO: 4196990 - RNA, 63 nt, Human
gggcugcagcccggcgcgccugagccugcgaguccgcgagccagcgagcugcggcugcggccu

SEQ ID NO: 4196991 - RNA, 84 nt, Human
gggcugcagugaggauucuuaggugguuugaacuuccaccaggcacaaagguggaagcauuugagcuuucuuacuggcaugucc

SEQ ID NO: 4196992 - RNA, 59 nt, Human
ggcucugaguuuagaaggguggggagaaaucuauaucccucagucucuuggucagagcu

SEQ ID NO: 4196993 - RNA, 83 nt, Human
ggcucugcagcucauccucuucuccuggcuccugaggaugccugaaggcagccuggaguucccaggagaagacugaaaaggcc

SEQ ID NO: 4196994 - RNA, 56 nt, Human
ggcucugcccgcggcugcccacgaguucccaccgcccgcccguccgugggagagcc

SEQ ID NO: 4196995 - RNA, 97 nt, Human
ggcucugcugcagugacaauuccaaaucucacugucuucacacagcucauacuguagguccaggagauuuggcaauucgggcugccucugcaguucc

SEQ ID NO: 4196996 - RNA, 86 nt, Human
ggcucugcuuucauaacaagaccuggagaccugagugguauaaacaacuaaaauuuauuucaccaucccaguaugggugcacugcc

SEQ ID NO: 4196997 - RNA, 105 nt, Human
ggcucuggagcuuggaguagcugcauggagauggcagaagcucaaagccacuuccuccaggaagccuucugugauuccuccagccagcuacuccucucccaaguc

SEQ ID NO: 4196998 - RNA, 57 nt, Human
ggcucugggccagaguuggcuucuaggcuauaguuugccaauuccugguuuagaguu

SEQ ID NO: 4196999 - RNA, 66 nt, Human
ggcucugggcugcgggcgccccuccacccccuggcagcuucuggagggggccagcggccuguagcc

SEQ ID NO: 4197000 - RNA, 68 nt, Human
ggcucuggggcagauggaacagagcacacugagaggaugagccuggauuguauuuguuuccccaggcc

SEQ ID NO: 4197001 - RNA, 72 nt, Human
ggcucugguucccggaucuccaugucccgcuccaccagcuaccugagcagcauggguuccgggggccuggcc

SEQ ID NO: 4197002 - RNA, 55 nt, Human
ggcucugucuuugcagucuccaacugcugcucagaggggcuggagggauagagcc

SEQ ID NO: 4197003 - RNA, 55 nt, Human
ggcucugugcagggugcuuuugugaacauggccucauggcaucugcacagcagcc

SEQ ID NO: 4197004 - RNA, 129 nt, Human
ggcucugugcuggcaggcucugcguugcucagauccuguucccaccuacaaccuggagggagggcucccagccccaucuauagagguggaaacugagguucagagagaguguaugacuugccuagggcc

SEQ ID NO: 4197005 - RNA, 55 nt, Human
ggcucuguggcuggccaugauggucgauuggagaucaucugagcccacagaaguc

SEQ ID NO: 4197006 - RNA, 66 nt, Human
ggcucuucaucaucagcaagccauggggcauaugccacaggaagugccuggugagaggauccugcc

SEQ ID NO: 4197007 - RNA, 105 nt, Human
ggcucuucauugcgccagaagugacaaugcugugcuccucaugaggcuccaguggaagcugaauccucacagaggggcagccaucugggacucuggguggaggcc

SEQ ID NO: 4197008 - RNA, 56 nt, Human
ggcucuucuacuucagauggggagcacccgcuucccacuaggcagacagaaaagcc

SEQ ID NO: 4197009 - RNA, 66 nt, Human
ggcucuucuguuucacaggccaaggggcucacagcccagggccuuugcaaagaagcagggcaggcc

SEQ ID NO: 4197010 - RNA, 89 nt, Human
ggcucuucuuagauccaggaaauucccagaaggacugucagcugucagcagcaagcagcuggggaguucuuuaguccuuaaggaggauc

SEQ ID NO: 4197011 - RNA, 97 nt, Human
ggcucuugagacuauggaggcugagaagucucaugaucuacaaucuaccuucggcaaguuggagacucaugagaaccagcaguauaguucagaggcc

SEQ ID NO: 4197012 - RNA, 83 nt, Human
ggcucuuggaagagcuggggcagcuuaggagugacuuugguuaggcauggccagcccccaguuccucugcaauuccaaguguc

SEQ ID NO: 4197013 - RNA, 87 nt, Human
ggcucuuguaaccaugucuuguuuuccuaguuguuuagaacccaaacacuagaagccagaaaaccuucagagaauggacucagagcc

SEQ ID NO: 4197014 - RNA, 57 nt, Human
ggcucuuuucccauuuugcuuaugcugcugucuugaccagucuaggcaaugggggcu

SEQ ID NO: 4197015 - RNA, 72 nt, Human
ggcugaaagaaggauauuugacacauuuacauagcaaacuuagucaauguuuggaaauccuuuguaguggcc

SEQ ID NO: 4197016 - RNA, 61 nt, Human
ggcugaaagaaugggggcccugggccuucuuggugggcuguuguucccuguucucucugcc

SEQ ID NO: 4197017 - RNA, 83 nt, Human
ggcugaaaggauaaaugcauacaugguuuugauggauauuucugaauuuuccuucacuguaucauguugcacuuaacacugcc

SEQ ID NO: 4197018 - RNA, 57 nt, Human
ggcugaagagaggccuugagcaccuuaggagugcuuggaccaggucaucuucaagcu

SEQ ID NO: 4197019 - RNA, 130 nt, Human
ggcugaaggauggcaauuaacaaugaaacauagaaagcagaugaaauugcaacaaauuguaaagaaaaaguguagcaaauuaucgugccuuaaaugugcuguucaacuaaucacugccaccagaaauacc

SEQ ID NO: 4197020 - RNA, 61 nt, Human
ggcugaaggcagugaguuuguguuuccuuuggaaugagcacauguucuacuggcuucugcc

SEQ ID NO: 4197021 - RNA, 64 nt, Human
ggcugacacuuuagcuuugaagucauuaaccacuaggugguaguuaaagcuaugguagugggcu

SEQ ID NO: 4197022 - RNA, 74 nt, Human
ggcugacagaccgguaugcagggacguuccuccauggccucccaugacaggcucugcagugcuggaggacagcc

SEQ ID NO: 4197023 - RNA, 85 nt, Human
ggcugacuggggcacaggcucccgaaaucacccaugugguugaccucacuuggagaagaggggucuggccuaaugucacacagcu

SEQ ID NO: 4197024 - RNA, 66 nt, Human
ggggguggagacuggguccaggaccuagcagcccuaccucgaggcccugcuuccaggcucaccccc

SEQ ID NO: 4197025 - RNA, 74 nt, Human
ggggguggccagaggcagaugcccaaugcuggcagaaggugugcagagcauugagggucugccaaguuacccuu

SEQ ID NO: 4197026 - RNA, 95 nt, Human
ggggguggggucccaccaggugaccauuucaugugagguaaauggagucagucagaugaagucacuugucaccugccucugugaagccucccccu

SEQ ID NO: 4197027 - RNA, 57 nt, Human
gggggugguucuaaguccuauauggucacugcaugaggcuaagaugacuccaccccc

SEQ ID NO: 4197028 - RNA, 91 nt, Human
ggggguguggaggagagagagugagcuuugcuaaacccaggcccaauugcaugaaguugcuguagcucauuucacucuccuuuguuccuuc

SEQ ID NO: 4197029 - RNA, 81 nt, Human
ggggguucuuuggaauaagucaagcuguuggaagcuuugucugggcaaaguguguagcugacaucuaaaggaacuauuccc

SEQ ID NO: 4197030 - RNA, 89 nt, Human
ggggguugaauuuccugggccuuugcuuauuaauuuuauuuuaaaauacggaauuauaggcaaagcagucauuuaaaaugcaaaucccc

SEQ ID NO: 4197031 - RNA, 61 nt, Human
gggguacagaauaaaaauccuacaggauaaaauuccagccuguuuauuuccucuguaccuu

SEQ ID NO: 4197032 - RNA, 64 nt, Human
gggguacccaaagcucuuggauuuuagacucagaaggccuggguuaaaaccugaacucuacccc

SEQ ID NO: 4197033 - RNA, 94 nt, Human
gggguagacuccucucggggagaaggugucccaggccagcugugugugcuggggccgaccacacagcugcugagacaggcccuggaggaacccc

SEQ ID NO: 4197034 - RNA, 59 nt, Human
gggguagaguuuggcuuucaaaugaccagcaagucaacauuggcagcagcucagccacc

SEQ ID NO: 4197035 - RNA, 71 nt, Human
gggguagaucuagaauguaaauccagacacagcucaaaauugaugucucucuauacucuaacucuuucccc

SEQ ID NO: 4197036 - RNA, 68 nt, Human
gggguagcagcugcccugccuugcccuuagagcaucuccuuaaaagcacaacagguaggccagacccu

SEQ ID NO: 4197037 - RNA, 58 nt, Human
gggguaggaagagaaaauagugcuugucuccagaauuacuuuuuucacuucuagcccc

SEQ ID NO: 4197038 - RNA, 72 nt, Human
gggguaggaugccuugucccaucuguggccucagcccacuggguuccagacacaccaggcccauucugcuuc

SEQ ID NO: 4197039 - RNA, 57 nt, Human
gggguaggcaggugaucugaucagggcgaagacccagaccagcacguagguugcccc

SEQ ID NO: 4197040 - RNA, 63 nt, Human
gggguagguguagcgcuauaaccaguuuaugggaacaccaggaaauagcuugucagcugcucc

SEQ ID NO: 4197041 - RNA, 128 nt, Human
gggguauuguggccagacuccaaaagacuuguccacggcugagcuaauccggccugggcccagaggggagcagagccugccucuggcuguggacagggcgucuggaggggccucacucuguguacccc

SEQ ID NO: 4197042 - RNA, 76 nt, Human
gggguauuucugcugaggcugagcaaugagccaccagaagcaauggcucauugcucaggcccagcaggaauucccc

SEQ ID NO: 4197043 - RNA, 64 nt, Human
ggggucaaggcagcagggccugugggccccgauaaggcuccacagaggacaacugccuggcccc

SEQ ID NO: 4197044 - RNA, 83 nt, Human
ggggucaucugaccuggcuuuggggauaggcuuccuguaaggaagggcaggaguuagccagacaaagugggucagaaggcccc

SEQ ID NO: 4197045 - RNA, 87 nt, Human
gggguccauuucauuuacauuuccuguugccaucaagaauggcucuuuaaugaguuuuccgcagcaggauguagagacacagaugcc

SEQ ID NO: 4197046 - RNA, 86 nt, Human
ggggucuaaagccaggcagggcucucgcucucugggucccuuucagcacagagcagcgagccagcucugcggguccucccuacccc

SEQ ID NO: 4197047 - RNA, 86 nt, Human
ggggucuagcccaugggagguguucugccaacgcgggucccucccguccccuucaggagccgcggugcgcugaccacuucgacccc

SEQ ID NO: 4197048 - RNA, 88 nt, Human
ggggucucacucugucacccaggcuggagugcaguggcgugaucuuggcucacugcaaucuccgucucccagguucaagugauucucc

SEQ ID NO: 4197049 - RNA, 56 nt, Human
ggggucucagagcucggggugccaucuucugggggacccacggucuuugaggcucu

SEQ ID NO: 4197050 - RNA, 58 nt, Human
ggggucugcugcggagcagagagacugauuauuauuuuuuaaaucuccaguugacccc

SEQ ID NO: 4197051 - RNA, 55 nt, Human
ggggucuggggugugugguucugcccaggucugcagacagcagucuccaaacccc

SEQ ID NO: 4197052 - RNA, 89 nt, Human
ggggugaaaagaaauguugccuaacuggccuuuacucacggagugaccaucaucucagcuaguuaguguaugagcggcaccagcacccc

SEQ ID NO: 4197053 - RNA, 60 nt, Human
ggggugaagcuaaacccacagugaacgugaagcaaucugugguuaaaguugugucauccc

SEQ ID NO: 4197054 - RNA, 80 nt, Human
ggggugaauuaaauggaucuguggaauacauugugacacuugcaucacaagugacccugagccauuuccacuuucacucu

SEQ ID NO: 4197055 - RNA, 69 nt, Human
ggggugacaggccugagguuccugugcucaccagcagcgaaggugacauuagaacccaggugucucucc

SEQ ID NO: 4197056 - RNA, 60 nt, Human
ggggugaggaaagauggugacagugaugaaauaaauaccaugacuguucucuccugcccu

SEQ ID NO: 4197057 - RNA, 59 nt, Human
ggggugagggaugagccuucuucggcaucgucagaaaaggcucucacucccuccguucc

SEQ ID NO: 4197058 - RNA, 61 nt, Human
ggggugagucaugauuguucugagucagaauaagucuaagucaagcauggugccucaccuc

SEQ ID NO: 4197059 - RNA, 68 nt, Human
ggggugaguugaguuaguggauuuguuuccucuuaagaggcugccgaaacugaucuuguucuuacucc

SEQ ID NO: 4197060 - RNA, 94 nt, Human
ggggugaucaagguaaccagaacuggugcauacucagucuucacggagacugcuucuccaaugaauuagauucuguguucuugccuugcacccu

SEQ ID NO: 4197061 - RNA, 79 nt, Human
ggggugcagccaagccucccacgagcucaccagcaucucggguugaggagcaggaugggaggcugggcuccgccauccc

SEQ ID NO: 4197062 - RNA, 116 nt, Human
gggguggacggcgcggggggaggggcgccuggcuggaacgccgaggcggcggcucggccaaucagcgcgcggccgccggcgguuucaaggugccccgcgccgcgcgcccccacccc

SEQ ID NO: 4197063 - RNA, 88 nt, Human
gggguggagaguucuguagauaucuauuaggucugcuuggugcagagcugaguucaauucuuggauauccuuguuaacuuucugucuc

SEQ ID NO: 4197064 - RNA, 90 nt, Human
gggguggaggagguauuccugcuucagguagaggggguggaagggguauucccacuccggguacagggggcagagaggguauuccagcuc

SEQ ID NO: 4197065 - RNA, 76 nt, Human
gggguggcccuacccucuggaauauacaaaaccuuacacagacacaauauauacaccggggaaggggggccacccc

SEQ ID NO: 4197066 - RNA, 109 nt, Human
gggucaggaaacuuggaaugggggaaucuguuuagacucaguugaaacugaccaucuggaaacagaaagucaggcugagccuuucuuaccaguuuaaguagcuugucuc

SEQ ID NO: 4197067 - RNA, 73 nt, Human
gggucaggaggcugaauggccagaagccagcaaccugcugguggucaccauuuucagacccaagugccugccc

SEQ ID NO: 4197068 - RNA, 71 nt, Human
gggucaggcucagcagggcagcccugucaguucuucaaaagcagggaccucagcccuccugggcuuugccc

SEQ ID NO: 4197069 - RNA, 67 nt, Human
gggucaggcugcccguucagggcucggcgugugaggcggagacucuccuggggagccugcggugccc

SEQ ID NO: 4197070 - RNA, 77 nt, Human
gggucagguguuuuauuggcagcaugagcuccugggauguucauucaccucauuuucauugccagucacgcugaccc

SEQ ID NO: 4197071 - RNA, 62 nt, Human
gggucaucauacugaacuguaucagggaaugccauucagaucauagucuuugugacuggccc

SEQ ID NO: 4197072 - RNA, 60 nt, Human
gggucauccagcaccucugggucuugucuuucaauaaaggaauggcuagaagugugaccc

SEQ ID NO: 4197073 - RNA, 63 nt, Human
gggucaugcugcuguguuggagagggacuggaaaaacacucguguuccuacacuguaggaucc

SEQ ID NO: 4197074 - RNA, 78 nt, Human
ggguccaaaggagccaagauggggcaaguaugggagggcccagcccugugccagcucccuuuucuccuccccugaccc

SEQ ID NO: 4197075 - RNA, 76 nt, Human
ggguccaauuuuauucuucugcaaguggcuauccaguuuucccaacaccauuuguugaaguaguugucuuuccccc

SEQ ID NO: 4197076 - RNA, 69 nt, Human
ggguccagaguugaagagguuagaaaguuggcagaaacaacucuaguaauaaggcuugaacuuugaucc

SEQ ID NO: 4197077 - RNA, 81 nt, Human
ggguccaggcaucuguauuuuuuaaguucccccagauaaugcuaauagacaucuaggauugaggacugcuauccuggaccc

SEQ ID NO: 4197078 - RNA, 82 nt, Human
ggguccauuuguguuccuguuucugcguaguuuguagcucauauucagugcagaaauggggagcucagcagaaagcaagccc

SEQ ID NO: 4197079 - RNA, 62 nt, Human
gggccugccauugcugccccagcccugggcucagggagcaggugcauagcagaggcagggcc

SEQ ID NO: 4197080 - RNA, 55 nt, Human
gggccugcccacgugggguuaagguuaccaguggccucugccucuggucaggcuc

SEQ ID NO: 4197081 - RNA, 85 nt, Human
gggccugccucuugguuuucugcaccucagcuuuucccggauagguggggacccaucaucaaaagugacagagaagauaaggccc

SEQ ID NO: 4197082 - RNA, 60 nt, Human
gggccugcuggugcuuccauugagacacccauucucgcaauaggaaagaccagcuggccu

SEQ ID NO: 4197083 - RNA, 60 nt, Human
gggccuggcagggcugcaguaauggggaaucacacuucauuauugcuguuuucuaagucc

SEQ ID NO: 4197084 - RNA, 58 nt, Human
gggccuggcaugcagccccguuccagggagaagaaacggggaugcgaccacaggcucc

SEQ ID NO: 4197085 - RNA, 96 nt, Human
gggccuggcucugagucacggacgggacccagccucccagaaacaacccuguucagcucuggagcgaggucccugucugggaaaagacgccagccc

SEQ ID NO: 4197086 - RNA, 56 nt, Human
gggccugggcacccuauccccaggacacaggaccugggcacccaguaccuaggccc

SEQ ID NO: 4197087 - RNA, 106 nt, Human
gggccuuacaauaucauagagguuugugagcauguuuacuugauugauauauguucagaacaggucuuacagccacuuuuugcuuuugugaugauuuguuuugccu

SEQ ID NO: 4197088 - RNA, 72 nt, Human
gggccuucagugacagccacccaggcaccaugcauaacugcaccaggucugcuaagcugucauucugagccu

SEQ ID NO: 4197089 - RNA, 62 nt, Human
gggccuuccagugauaugcgugaaucagcauuagauccgcuuaucucagcuggcaggagccu

SEQ ID NO: 4197090 - RNA, 60 nt, Human
gggccuuccucccucaggcuccucucaccccucggggcugcccucaggggaggauggccu

SEQ ID NO: 4197091 - RNA, 76 nt, Human
gggccuuccugaguucuguagggugaaauagucauucuuggccuaucuaucacugcagaccuugggguuguggccu

SEQ ID NO: 4197092 - RNA, 66 nt, Human
gggccuucuguccaggcuggccuggaucauucuccagguacaucuauggggauagaacaguggccc

SEQ ID NO: 4197093 - RNA, 84 nt, Human
gggccuuuggccuccugaaguuuaugcuuuucgggucuuaaaggaugcuggaccccgagaguuggacuccagagcuaaaggcuu

SEQ ID NO: 4197094 - RNA, 57 nt, Human
gggcgaaugcucuuucugaacauucucagcuuuagcuaagcaaggaaagggcagccc

SEQ ID NO: 4197095 - RNA, 75 nt, Human
gggcgagcuacugauucccuggugccuccguuucuucuuaugaaaagggcguaacgggaguucuuaguucagccu

SEQ ID NO: 4197096 - RNA, 69 nt, Human
gggcgaggcgcaggagaggggagcccagguuuggauuugucaaacuugagucacuucucuucccucccc

SEQ ID NO: 4197097 - RNA, 82 nt, Human
gggcgccauucugagcaugcuacaugcagcaccuuguguguuccccacagugcccuguaaguugugugcucugguugugccc

SEQ ID NO: 4197098 - RNA, 56 nt, Human
gggcgcccccuucaaacagagcacagcccaggagcugcuccaggagggggcagucc

SEQ ID NO: 4197099 - RNA, 123 nt, Human
gggcgcgcgcgcggggggugcgcgugucccgggagcgcguccgcgcggcggccucccgcgugcucgugugcgcgcgcgucccgggugccgcgcgcccuucuuaugcacagcugcggugcgccc

SEQ ID NO: 4197100 - RNA, 124 nt, Human
gggcgcgggcggcggcggggggcgccggcugcugcggcggggccgggcggcugcuccgcgcaugugcacccguccagguggcccugcccuacucugcggcgccggcacggccgcccccgggccc

SEQ ID NO: 4197101 - RNA, 85 nt, Human
gggcgcgguggcucacgccuguaaucccagcacuuugggaggccgaggugaguggaucacgaggucaggaguucgagaccagccu

SEQ ID NO: 4197102 - RNA, 76 nt, Human
gggcgcuguggcugcgguuguccucggcggugcccacuacgccgauggaggagauggacagcugcgcgcagggcuc

SEQ ID NO: 4197103 - RNA, 67 nt, Human
gggcgcuuuguggagaccuccuaggauguguaggacccccacacacccugugagucccuggcugccc

SEQ ID NO: 4197104 - RNA, 77 nt, Human
gggcggagcuaccagcccaggcucagauguuggggugugaaagccucaagugacucagccugguuggagaacugccc

SEQ ID NO: 4197105 - RNA, 78 nt, Human
gggcggauacccugggugacccgugagcguccgcgcccggcgcgcgccugcgcagucgcuuuucgagaguuuccgccc

SEQ ID NO: 4197106 - RNA, 71 nt, Human
gggcggccaggagagcccggguccgggcuuccgccuucgcagggccugucucgggcucuucggccgggccc

SEQ ID NO: 4197107 - RNA, 76 nt, Human
gggcggcccgugcgggauccccgcgcucuccaccugcgaggggcgggccggagcugggucccgcgcgcgguuuccc

SEQ ID NO: 4197108 - RNA, 69 nt, Human
gggcggcugaggcuggcguuugaggaagcccggaaaugggccucuuucaccgugccugucccgcuggcc

SEQ ID NO: 4197109 - RNA, 93 nt, Human
gggcgggcagucccuaggggcaucccucugaggggccaggcuccaucuucuaggaugccugguguccagaggcgaguggaccgcugccuaccc

SEQ ID NO: 4197110 - RNA, 68 nt, Human
gggcgggguggcucaugccuguaaucccaguacuuugggaggcugaaaugggcagaucacuugagccc

SEQ ID NO: 4197111 - RNA, 72 nt, Human
gggcgggguuuggggagguucgggaaucuuguggcaucugcccucaacacagguuccaucuccaccuugccc

SEQ ID NO: 4197112 - RNA, 95 nt, Human
gggcgguaauuagcuaaugcuucuggaaugcugcuuccuucccaccagccccuggaggucagcaggccaggggcgaaggcagcuuuguccugccc

SEQ ID NO: 4197113 - RNA, 108 nt, Human
gggcguggggacaagguuugcaugggagaccaggcaauuccaguuaguggguucccgucuagcccaggaaugccguggccucuggucagcuccuucugucuccggccu

SEQ ID NO: 4197114 - RNA, 61 nt, Human
gggcgugggguagguagacauggaggggaaaaauaauacucugugcuuaacuacucacccc

SEQ ID NO: 4197115 - RNA, 78 nt, Human
gggcgugugugggagcaggagagggauucucugggguccccauuuggaaccuggagacccacuucugccaacaagucc

SEQ ID NO: 4197116 - RNA, 116 nt, Human
gggcuaaaaucaagguguugucagggcugugugucuuucuggaggcuccaaaggagaaucccuuuucuuacuauuuccuucuuccagaggcugcccagaucccuugguucauaucc

SEQ ID NO: 4197117 - RNA, 72 nt, Human
gggcuaaacagagagcuuccuugauuauguucagauugaaugaaaucaaacccuuuucugauauuguggucc

SEQ ID NO: 4197118 - RNA, 56 nt, Human
gggcuaaaugcagaaaugcagagaaagaccucugaccacacaguucugucuagucc

SEQ ID NO: 4197119 - RNA, 58 nt, Human
gggcuacagacaugcucuaagcuuuacuauugaaaguuaguggagcuuguuguggcuc

SEQ ID NO: 4197120 - RNA, 70 nt, Human
gggcuaccaccuccauccuccuuucagccagcagggacaguuucuggaaggaguggugagguuggagucc

SEQ ID NO: 4197121 - RNA, 88 nt, Human
gggcuaccugagauugcaggugccaccaguugcaaucugggccacaugcaagcuggugucaccuccaguccaccagugaauuuagccc

SEQ ID NO: 4197122 - RNA, 76 nt, Human
gggcuaccuggcuccugugguacucccagggccugggccaggcggggaaugcgcacgggaacugcuuuuuggaccc

SEQ ID NO: 4197123 - RNA, 60 nt, Human
gggcuagcagauucuaccuaauugcucuccccacauccagaaguaggugguugcuggucu

SEQ ID NO: 4197124 - RNA, 73 nt, Human
gggcuagcgcuaguguuaugcaugcacuuggcugcaggaacuggcuacagguaugugcaugacaucacagccc

SEQ ID NO: 4197125 - RNA, 77 nt, Human
gggcuagcuuaccuuaggccauaaguauuauuuguugagaugcgugaauacaagaaugucuuaaaagcucuaggcuc

SEQ ID NO: 4197126 - RNA, 62 nt, Human
gggcuaggggaauaaucugugguaguuuuaugagugaccaucauuguuuuuucucuuagucc

SEQ ID NO: 4197127 - RNA, 99 nt, Human
gggcuauaagauauuugaaagaaacccuagcguuguuuauugaauccaggguugacucaagaagauaaugucuaggguuagauguucaaaaauauaccc

SEQ ID NO: 4197128 - RNA, 56 nt, Human
gggcuauggaacagugaggcugggauucgaacccaggcugucugaccccagagccc

SEQ ID NO: 4197129 - RNA, 71 nt, Human
gggcuaugucuucuuguuuugaaggaaauaggacacacacuaucuuuccaaucaccaaggagaaagaggcu

SEQ ID NO: 4197130 - RNA, 90 nt, Human
gggcucaaaauuuaggaggcauuugcucccagggcugacauugcacuuuugggacccucagagcaaaugucuccuuaaauuucccagccu

SEQ ID NO: 4197131 - RNA, 82 nt, Human
gggcucaagggggcucuggagaagaggagcuggaagccugggccucccauguacccaccuccauucucaucugccugggccc

SEQ ID NO: 4197132 - RNA, 58 nt, Human
gggcucacccaacucuggaaaaucaucugaugaagccucagaggcugggggaaugccc

SEQ ID NO: 4197133 - RNA, 62 nt, Human
gggcuccaggacucaggccccugggaaagggcccccacucagcauccaguuccugcgagccc

SEQ ID NO: 4197134 - RNA, 65 nt, Human
gggcuccaggcuuuggggcaggagcgcuugccccugggugcccugcccucgcggccugcaugccu

SEQ ID NO: 4197135 - RNA, 55 nt, Human
gggcuccaguuguccccaggaucccucccccgacccgggggcccccuuggugccu

SEQ ID NO: 4197136 - RNA, 62 nt, Human
gggcuccauacuuccaacaaacuuuagacugaaucauaucuagcagcuugagucuggagcuc

SEQ ID NO: 4197137 - RNA, 108 nt, Human
gggcucccauccggguaccugaggauuuuccacauagaucacagguguuggggcccacaucggcuccugaaagacuaugggaacgccauaggccuggggcgggugcuc

SEQ ID NO: 4197138 - RNA, 73 nt, Human
gggcucccccgcaggugccggcagaugggguagcgaaugguccugugccuccaccugcuccgggagggagucu

SEQ ID NO: 4197139 - RNA, 76 nt, Human
gggcucccucaccaccaucacaugacacaaaccaaaaaagaggucuucaagcaugugcugagugcuggggaagucu

SEQ ID NO: 4197140 - RNA, 85 nt, Human
gggaauguggauucagguggaauuaauuaagagagaacuaacuuccagcucuuuauuaguguguugcaccugcauccuaguggcc

SEQ ID NO: 4197141 - RNA, 56 nt, Human
gggaaugugucugauggaaagaauauucuuuuguucaaauccaucagcaaauuccu

SEQ ID NO: 4197142 - RNA, 56 nt, Human
gggaauuaggcacacaacuucuguuaagaguaaaggaagcuuaaugccuaauuucc

SEQ ID NO: 4197143 - RNA, 87 nt, Human
gggaauuauugaaugauauuuguauuacaaagucacaguaucaauaugucuguguaaugugugauacauagauccuaauuuauuccu

SEQ ID NO: 4197144 - RNA, 125 nt, Human
gggaauucaauccauuuuggcugcuuuaauggagcuccuggggcuuagacacuauugaaaggcaauuacugacuuucaguuguuuuagcucugugaguucauugcuagcccccucccuuauuccc

SEQ ID NO: 4197145 - RNA, 72 nt, Human
gggaauugguguggcagggggaaguuuugaugguaaaacgagcaaagcuuuaucccuugcccaucgaugccc

SEQ ID NO: 4197146 - RNA, 58 nt, Human
gggacaaacugacuccugcuguugacuuaauuucugcacugcuuucacaguuuguucc

SEQ ID NO: 4197147 - RNA, 69 nt, Human
gggacaaggcagugugcaaaggauuuuaaauggauucuuucauuuaauccucacaagccuauaaagccc

SEQ ID NO: 4197148 - RNA, 58 nt, Human
gggacacagagcaaaucaugacagaugugggcccaucuggccauuugaucguaguccc

SEQ ID NO: 4197149 - RNA, 84 nt, Human
gggacagccuuuguccagugcaccagccucagcccacggagaagagugacugaggcccuagggcaugggagaggagggacgccc

SEQ ID NO: 4197150 - RNA, 90 nt, Human
gggacagcucucuuuuuggcccugacacuuugcagcugaguuuguacacuuaaauugaaguugcugugagggcucuagacuagcuaaacc

SEQ ID NO: 4197151 - RNA, 105 nt, Human
gggacaggaauggaugagcauacagggacuugccucaacugacccuuagggcuuccugagcacaggagccagguccuucacaugcauuucucagcuaauucuccc

SEQ ID NO: 4197152 - RNA, 76 nt, Human
gggacaggcagccugcugcucgaccagucccaggccugaggagguccacggggccagcgagggcaaggccuguccc

SEQ ID NO: 4197153 - RNA, 78 nt, Human
gggacaggcaggugaaagugaguagugagaacaaaaugugagcaaacaaccuucauuacuggcaaucugugugauucc

SEQ ID NO: 4197154 - RNA, 96 nt, Human
gggacaggcuccauggaaaaggcuguuguucaacuguuggccuuuucagccccauugugcggacagcaguuuuucucuaggguaccaaaguguccc

SEQ ID NO: 4197155 - RNA, 68 nt, Human
gggacaggugccagggucagcugcagcucuccuuccgggagcagggugugguggcccuggaugguccc

SEQ ID NO: 4197156 - RNA, 77 nt, Human
gggacaguauggaucuaaaucauuuccaucaccaucaaaaauuccacuggacagugcugaucuagacugaccauccc

SEQ ID NO: 4197157 - RNA, 58 nt, Human
gggacaguuucuccauuuacaccuuuugccuucagaagccucugggaaagccuguccc

SEQ ID NO: 4197158 - RNA, 91 nt, Human
gggacauauuagugucugugaauaauucucuccaucuuaaaccaagggaagggggccuaaacaggauuguccacagacagcaauggcucuc

SEQ ID NO: 4197159 - RNA, 64 nt, Human
gggacauggaggcgcgcaggcacugaggacgaaagggcccuggagccuggacgccguccauccu

SEQ ID NO: 4197160 - RNA, 85 nt, Human
gggacauguuugugggcgcuaacagcacuuauuuucuccaaagggcaaauuucaaacaauuccugugcugagugaucccauuccu

SEQ ID NO: 4197161 - RNA, 85 nt, Human
gggaccaggggccagagauaugaagaacuauggcuuugggggugccugccuaacucacaagagcccucuucacugccccuugccc

SEQ ID NO: 4197162 - RNA, 72 nt, Human
gggaccagggguuuaaggaaacgccugucugcaaaagaggguacaagacaggcagaccugugcccugggccc

SEQ ID NO: 4197163 - RNA, 56 nt, Human
gggaccccguaggccaccuguguuccuucagagcagugcuagccucacagggucuc

SEQ ID NO: 4197164 - RNA, 74 nt, Human
gggacccggguuugcgcguguggaaagcaaaagggguuacucugcuggaguucgacauugcaaauaaaggucuu

SEQ ID NO: 4197165 - RNA, 95 nt, Human
gggacccuugcugaagcugccugucuuuccucccucguagagacagggcgcuuuagaggagagguggcggaguuugggaagucaguuagggaccc

SEQ ID NO: 4197166 - RNA, 79 nt, Human
gggaccucacaauugaguuccacaaaccacaugagaauaauuacuguagaauggaaccaauuguaguggcugagcucuc

SEQ ID NO: 4197167 - RNA, 61 nt, Human
gguacccgcucugccucuuugcugcgucacagggugugauaaguuacacagaggagggccc

SEQ ID NO: 4197168 - RNA, 80 nt, Human
gguaccugagaagagguugucugugaugaguucgcuuuuauuaaugacgaauauaacacagauggccuguuuucaguacc

SEQ ID NO: 4197169 - RNA, 125 nt, Human
gguaccugcagugauguauauuuuaaggcuuagauucauuuuagcaaaaguuaguuuucuguaaauugcauucuagcucgcuguaaaaugaauucuaaguucucuuaguguuccacugcuguacu

SEQ ID NO: 4197170 - RNA, 97 nt, Human
gguaccugguagcucaucaaagacuagauaauccaagauugccucacucacguuuuuggugaaugaggcuggcuauggauuaauugguccaggggcc

SEQ ID NO: 4197171 - RNA, 84 nt, Human
gguacguugcaacaagcagcaaguuuauuucuaucaguguuuguacagauuuuuuaaaucuguugcuuuuuucucacauguacc

SEQ ID NO: 4197172 - RNA, 57 nt, Human
gguacuacaugguuggcuggggcauuuaauccugccaaggagacacgguguuguauu

SEQ ID NO: 4197173 - RNA, 70 nt, Human
gguacuaugaggcacguguuacuggccuaguuggagaccacuggagaggucaguuauauugcccaaggcc

SEQ ID NO: 4197174 - RNA, 81 nt, Human
gguacugaucuagaugcucaggaugcaggaauaaaccaaaagagacaaagguuucugcuguccuuuauauagauuacagcc

SEQ ID NO: 4197175 - RNA, 81 nt, Human
gguacuguggcauugaguggagaagaggauggucuccugaauagguuaggggucauuccuccccuccaguccccacaugcc

SEQ ID NO: 4197176 - RNA, 61 nt, Human
gguacuguugcuugcauaaugcuggcaugucccaacaugucccaaaugcaggcaaaguucc

SEQ ID NO: 4197177 - RNA, 74 nt, Human
gguacuucauguaaguggaaucacacaauauuuaucuuuuugugacuggcugauuuuacuuagcaugauguucu

SEQ ID NO: 4197178 - RNA, 64 nt, Human
gguagaagccaguggcuucucccugcugcccucacagcaggugagcacagccaggcuggcugcc

SEQ ID NO: 4197179 - RNA, 61 nt, Human
gguagaaugauuuuggacaauauggaucauaagaugauuuaaugucuuagauguuacuacu

SEQ ID NO: 4197180 - RNA, 84 nt, Human
gguagagaaauugcaaaguaaaaauagauucugagcauauaugaaauuaguuuagucauguuuuuaguuuaacagcuuacuacc

SEQ ID NO: 4197181 - RNA, 66 nt, Human
gguagagaugggcugagggaaaggaaagcuaggaacgaagaguacaccaccccaguccucuuuccc

SEQ ID NO: 4197182 - RNA, 74 nt, Human
gguagaggcggguggaucaugaggucaggagaucgagaccauccuggcuaacaaggugaaaccccgucucuacu

SEQ ID NO: 4197183 - RNA, 59 nt, Human
gguagagggaaauggaggaaagagacauuaaaaggaaaaugucaccauuuccaaaugcc

SEQ ID NO: 4197184 - RNA, 68 nt, Human
gguagauaguuggaauauuugugaauaaguuguugguauuuuacaaaguauauuucuagcugucagcc

SEQ ID NO: 4197185 - RNA, 118 nt, Human
gguagaugguuuagggaaauagcuugcagggaggagggcuuaguggagaaggucuguaggggcccugaguugagccuuccaaaacauuccuacaagccaaacagagagacuaucugcc

SEQ ID NO: 4197186 - RNA, 58 nt, Human
gguagcaaucagaaagaaccuugggauuuggggguccagagagaucuucugauagacc

SEQ ID NO: 4197187 - RNA, 64 nt, Human
gguagcaaugcauauguggguagcauggaauuugaacagcaccugcuuaaugugcagugagacu

SEQ ID NO: 4197188 - RNA, 78 nt, Human
gguagcauguagucagaguaugucaauguucuuuuccuuggaaauacaucacuuaugaaauauucuuuugcaugagcu

SEQ ID NO: 4197189 - RNA, 77 nt, Human
gguagcaugucauuauuuuccauguugguuucaaacagaugauuccacuugugaaauaaucaaauauaauugcugcc

SEQ ID NO: 4197190 - RNA, 82 nt, Human
gguagccacccagcucuuugauggucuuggccugcugguucaggaagucguucuccaggaagucgcagagcugggggucgcc

SEQ ID NO: 4197191 - RNA, 88 nt, Human
gguagcugguacaaaggagaauaggguagcaagcauaguaagcaugcugcuuaauuuuuuguucagcauccuuuuucuagaaacugcc

SEQ ID NO: 4197192 - RNA, 87 nt, Human
gguagcuugcaucacuuuacagugcugcuaauggcucaucauggggagccagauaaaagcauuuaaagaggaaacaaugcaggcucc

SEQ ID NO: 4197193 - RNA, 64 nt, Human
gguaggagagggccauggaaggagagggcaccccugccagccuugcccauggcucccuccugcc

SEQ ID NO: 4197194 - RNA, 73 nt, Human
gguaggaggacaggucugcaguaacugggaacuugggugaguuacccaacugcugagccuugguuuucucgcc

SEQ ID NO: 4197195 - RNA, 71 nt, Human
gguaggaggcucacuuaagcccaggaguuucaagauccuccuggacaacauagugagaccucaucucuacu

SEQ ID NO: 4197196 - RNA, 80 nt, Human
gguaggaguaguauaguaucauaaguuaauuaaacaguagacuuacuaucugguauuuccuuugauagcuaauacuuacc

SEQ ID NO: 4197197 - RNA, 70 nt, Human
gguagggacucuucugggaagcugacauguauccaguaggguaguuuagcaauuccagguaaguuaugcu

SEQ ID NO: 4197198 - RNA, 60 nt, Human
gguagggaugggauuuggaaguaggagcucagaguucaaauucugacccuguccauuacu

SEQ ID NO: 4197199 - RNA, 64 nt, Human
gguagggcucaagaaaguguaccucaguaagaccuguggacuuuuguuucuuggauacucuucc

SEQ ID NO: 4197200 - RNA, 63 nt, Human
gguaggggcaagucuggccauuucucuggaaugucaaccgagaggccaacuucuugccccucc

SEQ ID NO: 4197201 - RNA, 68 nt, Human
gguaggugagaaggacuguugcauuucuguuguucacucaucaaauagcaauuacccuucaacucucc

SEQ ID NO: 4197202 - RNA, 83 nt, Human
gguaguaaaaugggaauaugaaucuagaaaaugaugcuuuaagagccuuaaaugcuagauucauaccauuguauuagggaacc

SEQ ID NO: 4197203 - RNA, 82 nt, Human
gguaguaagugacugaacuaggauuggaaugagagcagucuggcuccauugucuuugguccuagccucuuuucaacacugcc

SEQ ID NO: 4197204 - RNA, 78 nt, Human
gguaguaccagaugagcugagaucauguacacuagugguugcucccuacauuaaauuggcuuacuuaucuaugcugcu

SEQ ID NO: 4197205 - RNA, 62 nt, Human
gguaguucuuaugcacacaucgcagcaggaacagugguguuccacgugugugugcagccgcc

SEQ ID NO: 4197206 - RNA, 71 nt, Human
gguaguuugaguuugcguugggguuuucugucacuuuuugacuggaagaguccuaaacagauauacaugcc

SEQ ID NO: 4197207 - RNA, 104 nt, Human
gguauaaucuguuuuucuuauacuucuagcacaagauaugaaaguguggaagacaucaaauuaugugcuacaagaaugaugauguaaagaaagcagacaaagcc

SEQ ID NO: 4197208 - RNA, 85 nt, Human
gguauaauuucaaguugaacaguauuuuuuaucuuuagcaucauuguaugagaugcagaguuugcuguggacuugggccuauacu

SEQ ID NO: 4197209 - RNA, 76 nt, Human
gguauacagauuucugggcaaucuaccaaacuuucugagucagaaccuggccaggaaucuguacuuuccaaaugcc

SEQ ID NO: 4197210 - RNA, 75 nt, Human
gguauagccuucuccucugagugacuccauuggugggugagcagcagggauggagcagaggaagaaggcuuuccc

SEQ ID NO: 4197211 - RNA, 95 nt, Human
gguaucacuuggagaauccacuuccaggacagccucacucacacagcuggaagucagugugguugcuggcuuggaccucaguucuccauuuggcc

SEQ ID NO: 4197212 - RNA, 78 nt, Human
gguaucauagucaucuguuuacuuuucugcuucuccaauuaaacaaggagucauguaaucacaaugaccuaagguacu

SEQ ID NO: 4197213 - RNA, 85 nt, Human
gguccuaacacacuguggcucauucuugguggcauagcaaccuaggucuugggugagacugcccaccaggcaguggccagggacu

SEQ ID NO: 4197214 - RNA, 129 nt, Human
gguccugaacucucacuuguguucuauugaucucauuauccaucacugcacugagaugaacucagugcagugaugaauaaugguuuagaaauugucaucuagcuuacuuuugaggaguucaaaaugauc

SEQ ID NO: 4197215 - RNA, 66 nt, Human
gguccugcauugccagcaagcuagaagccacuguucgguaauguuucaguugagaaugcacggacc

SEQ ID NO: 4197216 - RNA, 110 nt, Human
gguccugccauggcuucccacccugcuccccagccacguccaccagccacaccugcacagggugggugcaggucuugugccagggagcauggccgugggugguagugacc

SEQ ID NO: 4197217 - RNA, 71 nt, Human
gguccugcccucucucucuggcugccagcugcuacauccagcugugcacagauucagagguuuugcugacc

SEQ ID NO: 4197218 - RNA, 114 nt, Human
gguccugccuucucugccccucugcaaggcccuccaguagccacccagacccccaaauaggggucgcaagcacggggggccugccaggucuacagggcacugggggccauagcc

SEQ ID NO: 4197219 - RNA, 73 nt, Human
gguccugcuugcagcaggugcuuaggaacaagugugaguugauuuauagcugccugcagcacagcucugggcc

SEQ ID NO: 4197220 - RNA, 70 nt, Human
gguaaauaaagccugucucuuuagaguauaacauuucaaagugcuucggugaauugcaggcuuuaagacc

SEQ ID NO: 4197221 - RNA, 83 nt, Human
gguaaauaaggcagucacuggaauguuccucuccaaauugucagaacagaggaguuuuccagccugauuuucuuuccuccacc

SEQ ID NO: 4197222 - RNA, 125 nt, Human
gguaaauaagugacuuggaaaggaauauaaauacuauguacaggcugucuauaaaaaccaggguagagaauauuuuauuacacuaguagaauaguguuugcugugucauuuccuuacaauuuauc

SEQ ID NO: 4197223 - RNA, 73 nt, Human
gguaaaugcauucucgguuuguguguuggaaaaucuuggaucuuauguccaauacauaauuuaaauguauacc

SEQ ID NO: 4197224 - RNA, 62 nt, Human
gguaacacugcuucauuuuggagagugaucuaaaucuguuauucccaaugagcguguguacc

SEQ ID NO: 4197225 - RNA, 67 nt, Human
gguaacacugucauuuaagacauucuggagcccagguuuccauuugaaaugaaagugauagguuauc

SEQ ID NO: 4197226 - RNA, 73 nt, Human
gguaacauagcauuuacuuuucagaaauuaggugaaguguaacuauuuuaaggaguaaugcuuguuuguugcc

SEQ ID NO: 4197227 - RNA, 92 nt, Human
gguaacugagcagugcuggcucccagcuuucagggagagaaaauuauuccuccucaagcuggcugggagcuauuaaagguuuaaaugucacc

SEQ ID NO: 4197228 - RNA, 66 nt, Human
gguaacuguguuucacugguuaugcuuagcuguaaauccauagcauauacaguuuuacaggguuuc

SEQ ID NO: 4197229 - RNA, 66 nt, Human
gguaacuuaguaaaauaccuuuugaugauuagccucauuaggaauauuuucugaguaguuugugcc

SEQ ID NO: 4197230 - RNA, 68 nt, Human
gguaacuuuucuaacuuuacacucgaaagcaaauucuuuuguuguguguaguguuaaaaaauaugacc

SEQ ID NO: 4197231 - RNA, 69 nt, Human
gguaagaaagauggggcagaauggagccauccaucuggguagccucucuucccgcauucccuuuuaacc

SEQ ID NO: 4197232 - RNA, 59 nt, Human
gguaagaaguacaaaaauuuucuguguagguggauaccagaaggguuugucuuuuuucu

SEQ ID NO: 4197233 - RNA, 129 nt, Human
gguaagagggaacuacuguaauucuaauaugcuguaagggguuauagugauuacuguuaauucuucugagacuaguaacauguaucgcuuuuuaauauccuucaaauuuauuagguucccucaauugcu

SEQ ID NO: 4197234 - RNA, 84 nt, Human
gguaagaucccaggauuuagauuuggaggaacuaacaccuuuuaguccuugagccucuaaguaguguggaaucuaccuuuuacc

SEQ ID NO: 4197235 - RNA, 74 nt, Human
gguaagcaggcaaguuuggaaagcaaggugauaggugauagucuacagcugcaaguaagcuugcuccucuugcu

SEQ ID NO: 4197236 - RNA, 63 nt, Human
gguaagcauaggucuuucuguaucaccuuaagccuggaggcuuacaugaagcugguguuuguc

SEQ ID NO: 4197237 - RNA, 56 nt, Human
gguaagcgcuuuucucgauucccacuuucugacucuggggcauggaugagcuuacc

SEQ ID NO: 4197238 - RNA, 70 nt, Human
gguaagcucagagucucggagggaaaaaggagagacagcaugucuaguuucaucagagaaucuuggugcc

SEQ ID NO: 4197239 - RNA, 75 nt, Human
gguaaggccauggccccuggggcugggccuucugaggaagcucuggccuccuccaccagggaacaugcccaaacc

SEQ ID NO: 4197240 - RNA, 79 nt, Human
gguaaggguaaguggggcagaggccaagcaguacuucucaaacucaagcgugcaauucuguccacgcgaggcccuugcu

SEQ ID NO: 4197241 - RNA, 81 nt, Human
gguaauaaauuaagaauguuccaaaaaauauccauuuguucucagcaauauggagcugugugaauauucauaacuguuacu

SEQ ID NO: 4197242 - RNA, 84 nt, Human
gguaaugagagagucuggugauggucauugucauggacccugugggucagagggcacugucauaggcuaacccacuuaauuauc

SEQ ID NO: 4197243 - RNA, 55 nt, Human
gguaauuacaggaucucucuggcagucuugggaagaggagaaaccugugaaugcu

SEQ ID NO: 4197244 - RNA, 79 nt, Human
gguaauuauaugugaaguggguuauuuugguuuuuguuuauuuaaugaauagaauaacguaguuacacuuaguaauacu

SEQ ID NO: 4197245 - RNA, 76 nt, Human
gguaauucaaaacaaauuucaagcugugacaauaaaaugguucuuguaguagguugggguuugugcugaaauugcc

SEQ ID NO: 4197246 - RNA, 55 nt, Human
gguaauuccuuaagcugaagacuugaaggcaaguccuuucucauggaggaauuuc

SEQ ID NO: 4197247 - RNA, 78 nt, Human
gguaauugaggcacucuguacaaaucugcagguaaaugucaagcacacugacagggcauggugcagaguucugaggcc

SEQ ID NO: 4197248 - RNA, 70 nt, Human
gguaauuugaaggcacugaacuccuucugguaugugaguaauuuuuagugugauuuuaugccuuuuuacc

SEQ ID NO: 4197249 - RNA, 79 nt, Human
gguacaagcucaguggccauggugcggccacagauaagucuugcuggccugcaaagcccggcuguuaacuggcgugucu

SEQ ID NO: 4197250 - RNA, 73 nt, Human
gguacaagugucugaguaaauuucucauugaacuauuuuucaucaguguaaaaauaaucagauuacuaaugcu

SEQ ID NO: 4197251 - RNA, 70 nt, Human
gguacaauguagauguucacuugauuuuuauugaauaaaugaaggaauaagugaguacuuugcagguacu

SEQ ID NO: 4197252 - RNA, 60 nt, Human
gguacacauuuuucuuucucuugcauaaucauauuuuagagagaguuugugucagguacc

SEQ ID NO: 4197253 - RNA, 61 nt, Human
gguacagaugcugccugggaaugucugcccugcccgcagccacuccuucagcgucugcucc

SEQ ID NO: 4197254 - RNA, 61 nt, Human
gguacagcuaguuaaacauuugcaggacaaauauaaccgaauguguagcaggugcugugcc

SEQ ID NO: 4197255 - RNA, 58 nt, Human
gguacaggccaaaagguaauucaaaaagcgaaacgaaucucaucuccugaccugugcc

SEQ ID NO: 4197256 - RNA, 96 nt, Human
gguacagggaacaacauucacccaggccuuucuucuuggucugcauuuugcaacccaaagagugagcgccucuguaaauuuuguacucuaggugcc

SEQ ID NO: 4197257 - RNA, 73 nt, Human
gguacaguuuuuauucaugacaagauucuccauguccaccuuugauuugccucuuguuuugaaaggacuggcc

SEQ ID NO: 4197258 - RNA, 75 nt, Human
gguacauggagaggccgggguuaggaguggggcuugccugccuccagacaagcucgccugccccggaacagugcu

SEQ ID NO: 4197259 - RNA, 66 nt, Human
gguacaugugcacaaugugcagguuaguuacauauguauacaugugccauguugaugcgcugcacc

SEQ ID NO: 4197260 - RNA, 70 nt, Human
gguacauuauuguuagugagacuguagauuuuacucgauuuuaccagaaucucacuaauguccuuuugcu

SEQ ID NO: 4197261 - RNA, 63 nt, Human
gguaccacugugagacacaguccugcuugauuccugggcacagcaccuuuucacauugguacc

SEQ ID NO: 4197262 - RNA, 65 nt, Human
gguaccugccuuuccagucaccacuagaucaggcuucugagccuguuggcugucagggcuggacu

SEQ ID NO: 4197263 - RNA, 97 nt, Human
gguaccuuaagacuauuaugcugaaaaagacauaugugggcauucuggucacuaguccaggugugcccagucuucuagcuauaccugucaaggugcc

SEQ ID NO: 4197264 - RNA, 68 nt, Human
gguaccuuauuguacauuuuucgguuucuaccagcuucuggugacagcauggaagaagugauuggacu

SEQ ID NO: 4197265 - RNA, 55 nt, Human
gguaccuuugccaccucgcagggaauggcgugucccugucuuggacugaggcacc

SEQ ID NO: 4197266 - RNA, 76 nt, Human
gguacugaaguuuugacaucucauuucccaauagcuucccagcuggguccaaguguuauguaggauuucagagacc

SEQ ID NO: 4197267 - RNA, 79 nt, Human
gguacuguagauauuccugacuuaauuuuugacagaaaaguuaaggguaaucuugagucauggcauauauugaaagacc

SEQ ID NO: 4197268 - RNA, 80 nt, Human
gguacuugaagagugguuaucccugcuguguucgcuuaauuuaugacgaaucauacagggacauccaguuuuucaguauc

SEQ ID NO: 4197269 - RNA, 79 nt, Human
gguacuugaagggagaucgaccguguuauauucgcuuuauugacuucgaauaauacaugguugaucuuuucucaguauc

SEQ ID NO: 4197270 - RNA, 76 nt, Human
gguacuuguccaaggucaccugucugggaagugguuuggcauggucuagaaucugggauuucugacucuuagugcc

SEQ ID NO: 4197271 - RNA, 74 nt, Human
gguagaaaaaagaggagugguuuaugacaaguggaauccaaaugucauucaaguggcuccaguuccuuucuauc

SEQ ID NO: 4197272 - RNA, 65 nt, Human
gguagaaacaaccuugacccuuagucgggugaacagcuugcucaccuggcaggagcgagucuacc

SEQ ID NO: 4197273 - RNA, 74 nt, Human
gguagaagagcagagaguaagaggccauaugaaguccuuuagguuaaaugguauucucuaacucagcuuugacc

SEQ ID NO: 4197274 - RNA, 71 nt, Human
gguagaagguucauguauauuuauauuguuaauucagauauacuguguuccauggaccauuucugucuacc

SEQ ID NO: 4197275 - RNA, 62 nt, Human
gguagaggaggauuuguaaaggucucguggaggaauugagaucugaaggucuugcucucauc

SEQ ID NO: 4197276 - RNA, 92 nt, Human
gguagaguacaccgaguuuguuuuauuuugugcuaacccaaugagaaagcauauugguacaaaaccaugaaagaaagcggugguucucugcu

SEQ ID NO: 4197277 - RNA, 73 nt, Human
gguagagucugggagaggcuuggcccagccugggggguaccuaaaacucuccggugcagccucuggauucacc

SEQ ID NO: 4197278 - RNA, 65 nt, Human
gguagagugacggcucaucucuggaagcucaaccuccauguuuccucccaggaccucacucuacu

SEQ ID NO: 4197279 - RNA, 69 nt, Human
gguagaugaggcauauccuccuaugguucaagucagaaugaaccaugcaggcuauuuucaaaucauacc

SEQ ID NO: 4197280 - RNA, 67 nt, Human
gguagaugcauagagcacagcacaucaaguccaccagcauagauggugccaggcccuuguguuugcc

SEQ ID NO: 4197281 - RNA, 87 nt, Human
gguagauggaaggauggaaggugggagaccugucagaaggcucacagcuuaggccucugaaacuccagccccagguuuucccauacc

SEQ ID NO: 4197282 - RNA, 61 nt, Human
gguagauuggggccugucagggacucuaccccuauaguccuuacaggucauccaagucacc

SEQ ID NO: 4197283 - RNA, 64 nt, Human
gguagcagcucugagcaugcugcuaguuccccauagugccugcagauggccccagagugcugcc

SEQ ID NO: 4197284 - RNA, 59 nt, Human
gguagcagcugugaguaaaagccaucaccagguagauaggaggagaccgcaguguuacc

SEQ ID NO: 4197285 - RNA, 65 nt, Human
gguagcauaugcaguuuuacagaugaagaaacuaggauguaacuugccugggacucaaugcuacu

SEQ ID NO: 4197286 - RNA, 57 nt, Human
gguagcaugcacuguugagcgccauccauccacauggcugcccaacccugcaucucc

SEQ ID NO: 4197287 - RNA, 62 nt, Human
gguagccagcaauaaggugcuguugcagcucagcccugcuugcagucacucgguuggcuacc

SEQ ID NO: 4197288 - RNA, 76 nt, Human
ggucgaggcagguggaucaccugaggccaggaguucaagaacagccuggccaagauggugaaaccccgucucuacu

SEQ ID NO: 4197289 - RNA, 71 nt, Human
ggucgaugcugcccuguuuggacagcccggucuuccggggccgcacguuguccagcugggcaucguccacc

SEQ ID NO: 4197290 - RNA, 108 nt, Human
ggucgccgccgcagccuccgccgccgccgcagccgcugccgccaccgccgccgccacugucgcugcugucgccacggucgccgcugccgccgggccgcugccgcgacc

SEQ ID NO: 4197291 - RNA, 63 nt, Human
ggucgccguccgccgccugggccgacaggagucaccuuugagccugggcgcggacccguugcu

SEQ ID NO: 4197292 - RNA, 66 nt, Human
ggucgccugcucagcccaugagcaaccacuguggacaggguauugcgugugugcugaggggcgucc

SEQ ID NO: 4197293 - RNA, 125 nt, Human
ggucgcgcucacugcagauuggagaacaggugcaucucguagcucuucuuuggaaacaaaagaagccaccagcugaggaagaugcucaccggucaccgucccuuuauuuaugcccagcgaugacc

SEQ ID NO: 4197294 - RNA, 76 nt, Human
ggucgcuuaaaucccaaugcuagacccgguggcaaucaaggucuagccaccaggucuagcauugggauuuaagccc

SEQ ID NO: 4197295 - RNA, 58 nt, Human
ggucggcggcguggugccugcugcugccgccgcggcagcugagaucaugcuguugauc

SEQ ID NO: 4197296 - RNA, 90 nt, Human
ggucguauggagguuuagucacuggaauagcauugauucuugauuaaguggagggucuaacaaucuguucuaucuacaucucaucugagu

SEQ ID NO: 4197297 - RNA, 56 nt, Human
ggucgugaauugaaucaguggccaaccaaagcugcugacucccaaaauacaugacu

SEQ ID NO: 4197298 - RNA, 88 nt, Human
ggucguuuaucgauacaaagugaguguuggaggaacccaucaagacacaggaagggggaaauccuagcgccgccagucggagaugacc

SEQ ID NO: 4197299 - RNA, 58 nt, Human
ggucuacaguucuguccuagacuucguucggcugaucgaugaaggagacaagcuggcc

SEQ ID NO: 4197300 - RNA, 74 nt, Human
ggucuacugcucucccuccucccugcccaggccaaccuuagaaccagggcagggcugggugggagacagagacc

SEQ ID NO: 4197301 - RNA, 59 nt, Human
ggucuacuguugguggaauugacagaauuacggaauuguuaagagcuuagcaguaggcc

SEQ ID NO: 4197302 - RNA, 72 nt, Human
ggucuagaaucuaaacuauaguuugaugaaagcuuucauuuauauaaaaauugaggauugagauuguagacu

SEQ ID NO: 4197303 - RNA, 65 nt, Human
ggucuagcuaccugaacaaugcagacugcgucccuucgcagcuguggaguggggaguacuggucc

SEQ ID NO: 4197304 - RNA, 77 nt, Human
ggucuauuguggccacuguuucuuuuccucuggauuccuuuuaggugggagguaggagaaacagggccacaguugcc

SEQ ID NO: 4197305 - RNA, 56 nt, Human
ggucucacaggacuaaaagcaaagugucagaaaggcuguguuuccuccuggaggcu

SEQ ID NO: 4197306 - RNA, 66 nt, Human
ggucucagaguccuggggaugggaguggccugagccgaaccacauucaguccaggcuuggagugcc

SEQ ID NO: 4197307 - RNA, 61 nt, Human
ggucucagcaggggugucauuguaguuauccccugguagcuccugcagacuccugcucacc

SEQ ID NO: 4197308 - RNA, 56 nt, Human
ggucucagcaguugcuuugacuccuggguaaucugaaucacaaagcugccggggcc

SEQ ID NO: 4197309 - RNA, 58 nt, Human
ggucucaguccgugcuguucaggugagcugaccacaagacaccugggguggacagacc

SEQ ID NO: 4197310 - RNA, 130 nt, Human
ggucucauguccuuauggcauauggccagugaagccaagggcugcuuuuccuaauuccaguaugaacaauaccagauaaggacaauuagucuggcuuggcucaaauguccaucccuuaggcaagugcucc

SEQ ID NO: 4197311 - RNA, 87 nt, Human
ggucuccauuccugcuccucaggagcugcuggucucacggaagcuccugauacaugcaggaauaauuucaaauggagcauaaaagcc

SEQ ID NO: 4197312 - RNA, 67 nt, Human
ggucuccugaccuuuagucccuugcucuuuccacuaaaacaagccaccaaaggugaucaggaucacc

SEQ ID NO: 4197313 - RNA, 130 nt, Human
ggucuccuguauacacucucauaggcugugcacugcauaacuccagagaauccauccauucagacugugaugaguggugccuacuggaauugaggagugcccaaccuguacaacugucaauaacagcccu

SEQ ID NO: 4197314 - RNA, 77 nt, Human
ggucucgccucacuauggcagcggcauggcacagcacacucgacuucaugcucagcgccaaagcugauggcgagacc

SEQ ID NO: 4197315 - RNA, 75 nt, Human
ggucucuaagggcgcauggacugguguuucccagacuguggucuccagggacacacuagccggcuagugccugcc

SEQ ID NO: 4197316 - RNA, 75 nt, Human
ggucucugcucauauuuuuuaucuuuccugcaucuauucaacaggugacaaagacaaagauauguccaaaugacc

SEQ ID NO: 4197317 - RNA, 66 nt, Human
ggucucuggcagcacuagguacugagcugugggagcaguguuguaugggaugacugcuuuaguacc

SEQ ID NO: 4197318 - RNA, 56 nt, Human
ggucucuuugcuucagcuacagcuggcuguuugcugccccucaagcagaugaaacc

SEQ ID NO: 4197319 - RNA, 103 nt, Human
ggucugaaaaccagugaccuaagacaacaugaucagcaguccuucccagauaauaauuauuuuuccaggauuuguuuauaggucuuaaagugacuuucaggcc

SEQ ID NO: 4197320 - RNA, 62 nt, Human
ggucugacagcuccuagugcucacuuugugauaugggucagugagugcuuggagcaucagcu

SEQ ID NO: 4197321 - RNA, 86 nt, Human
ggucugagaucuuauuccaacuucacuauugucuaguaauguccuuuguagcaaaagacaguucugaguugggauaguuucaugcc

SEQ ID NO: 4197322 - RNA, 55 nt, Human
ggucugcccuuccucuccacgaugcuaccuugaagcaucugaaguaggugcagcu

SEQ ID NO: 4197323 - RNA, 69 nt, Human
ggucuggaaagguauuugucucaccuagggucagccucaagauuccuugagauaggacauuuccagauc

SEQ ID NO: 4197324 - RNA, 71 nt, Human
ggucuggauucagagcacagaagaauaggugcugucucuccagcacccagcaucugugccuaacuccagcc

SEQ ID NO: 4197325 - RNA, 70 nt, Human
ggucuggcaaaugcccuagggcugccuucucuucuuuagaggacuggguaggagcccagggccucagacc

SEQ ID NO: 4197326 - RNA, 68 nt, Human
ggucugggaacaccugcugcccaguggucugggaacaccugccacugggcagcagguguucuucaguc

SEQ ID NO: 4197327 - RNA, 59 nt, Human
ggucugggcuugaguccuuuugggaugaauauaaacagaaggaacuuuagaacauggcc

SEQ ID NO: 4197328 - RNA, 79 nt, Human
ggucugggggcuuaggcugggcuuuggugggagccaccgcugugauggccccuggcaccaggcugauuccuaccagacu

SEQ ID NO: 4197329 - RNA, 66 nt, Human
ggucugucauauauucugguuuucacugguccucaggccaggcaggcuagaauguaaauucaggcc

SEQ ID NO: 4197330 - RNA, 70 nt, Human
ggucugugcaguuacuagcugguagaaaugaaaacaaagauugugauuagcuguuaguaguguauaugcc

SEQ ID NO: 4197331 - RNA, 127 nt, Human
ggucuguggccuguuaggcacugggcugcacagcaggaggugagcagggagcaagcuagcacuagggcccaagcuccgccuccugucggaucaguggcagcauuagauacucauaggagcacagacc

SEQ ID NO: 4197332 - RNA, 96 nt, Human
ggucuguuaaaaagcugugugccauuccagcuuucuagguauuucuggugugacuuuucuggggccagcggggaggacucagcucuuucucagguc

SEQ ID NO: 4197333 - RNA, 73 nt, Human
ggucuuacugcuggggauccuuuuugcaucuagggccccgugccuugagaaagugggugccuagcaacuagcc

SEQ ID NO: 4197334 - RNA, 80 nt, Human
ggucuuagagccagagccccagagaacaguggaacaucauugaugagcuuugucccuugggggcucagggcucuucuacc

SEQ ID NO: 4197335 - RNA, 103 nt, Human
ggucuuaguucucuuuauuagaauuguuucuauuugccaaaguaacucaagcacuuggaacaaauuaaacaauacagggauagauaaagagaaauguagcauc

SEQ ID NO: 4197336 - RNA, 109 nt, Human
ggucuuaguucugcagcgacaucuuauggaguugguuaguuugcacaaccauuuaauaaugucugccagaacugaucauuguucuaacagauuugaugcaaauaggauc

SEQ ID NO: 4197337 - RNA, 70 nt, Human
ggucuuauugcaagguuugugaaaaacaugauagcauuguuguguugauauagaaaucuuauaaaagacu

SEQ ID NO: 4197338 - RNA, 100 nt, Human
ggucuuccugaaaccagcgggcuuccugaggaaugugaagagaaccaggucaccugggauuucuuccuuccucagaaggucuccccaagucaacaucgcc

SEQ ID NO: 4197339 - RNA, 61 nt, Human
ggucuuccugaaggauggcagccuccccagcagcaggugagguugauccagcaggacuucc

SEQ ID NO: 4197340 - RNA, 88 nt, Human
ggucuugagugugccaagguugugcaccuaaaugcauuuauucauuccccuaacauuuacuaggcacccacuuaggccagucaaugcc

SEQ ID NO: 4197341 - RNA, 99 nt, Human
ggucuugcaaauaaauucaaauuuuauucuacaugcaauagagauuuacuggagauuguaaguagaacaacauaaucugauuugaguuuuugcaaaguc

SEQ ID NO: 4197342 - RNA, 59 nt, Human
ggucuugugauuuggggcaagggcagaauccacugcccugaugauccuccucgcacacc

SEQ ID NO: 4197343 - RNA, 80 nt, Human
ggucuuuaguggcugguuuccugcaugcaacauauuuucaagauucauccauguuguagcaucaaucaguacuuuauucc

SEQ ID NO: 4197344 - RNA, 74 nt, Human
ggucuuuaucuuugaaauuagucugcuaucgguuuuauuaggcauaaugugacaaauuuucgggauaaaguacu

SEQ ID NO: 4197345 - RNA, 57 nt, Human
ggucuuugccugucuuuuagagccugccaacaccucucaaagagccagguaaucacc

SEQ ID NO: 4197346 - RNA, 58 nt, Human
ggucuuuggacucucucuccuuccuuugcagauggaaaggcagagaggaccagagacu

SEQ ID NO: 4197347 - RNA, 68 nt, Human
ggugaaagggucaaggcuacauggagacccagacccaggugaggucucugaugcuuugaccacucacc

SEQ ID NO: 4197348 - RNA, 60 nt, Human
ggugaagccagauuaucacaagccaugaaaaccuucuggaggugacgucugagcuuuguc

SEQ ID NO: 4197349 - RNA, 100 nt, Human
gggagucauucucaaacuugggcaugcaucagaaucaccuagagggaucuauacaccucccuucuagaguuucugaugcaacaggucgaggaugaugacc

SEQ ID NO: 4197350 - RNA, 67 nt, Human
gggaguccagggagauggcagaggcuggcauccuugacagcaucuguaggacuccucuuacauuccc

SEQ ID NO: 4197351 - RNA, 91 nt, Human
gggaguccuggugcaaguaauuggcgaggaguuuagacaauugugcaaccuggaugucuuugccaugcaugugucaggguugaacacuucc

SEQ ID NO: 4197352 - RNA, 63 nt, Human
gggagucugaaaguauguuguaaugcauagucuuguauagcuaugcuuugagauguaauuccc

SEQ ID NO: 4197353 - RNA, 84 nt, Human
gggagucuuugaagucuugcuuucuggcccauuauuauaauaaaucugccaguuugaugauggcuuaguggcagggcgaguccc

SEQ ID NO: 4197354 - RNA, 95 nt, Human
gggagugagagaggaagacucaaagcacuggggaaagccugcuaugaaaaugccaggccuuucuuggggcuuagaccgucaaccuaauccuagcc

SEQ ID NO: 4197355 - RNA, 90 nt, Human
gggaguggagggguauagauuugaggaauagaaauuaaaauagaacuuaaauuaccaucgucaaaucauaugaaagcucuuuuuacucuc

SEQ ID NO: 4197356 - RNA, 59 nt, Human
gggaguggggaggggugggccuguggcugcaggugcagugggcucaguccuccaacccc

SEQ ID NO: 4197357 - RNA, 85 nt, Human
gggaguguggauuuuaucagaaguaucuugggaaggcacuggacaauuucaagcaagaaagauacaugacuugauuuacauuucc

SEQ ID NO: 4197358 - RNA, 77 nt, Human
gggaguuagcaaagaagcaggcaauauuuuuaacuuguaucaucgggcaggaaaaggccauuguuucucugauuccc

SEQ ID NO: 4197359 - RNA, 110 nt, Human
gggaguuccucauuugccaugaguggacaccugcuucuuuacugcuucaaagugaacacagcuauuccuuguaaaggguagguuuuacuguaaggaaaucuagaacaccu

SEQ ID NO: 4197360 - RNA, 63 nt, Human
gggaguugugguuggcuucuggaaggugcuccaggacggcauagauggcagccagcugcuccu

SEQ ID NO: 4197361 - RNA, 62 nt, Human
ggguuuccagacacugccugccucagcuucagcuuagcccuugggcggguggacuggagccc

SEQ ID NO: 4197362 - RNA, 65 nt, Human
gggcgcggcggcgcgggccccgccgaggggggacaccuggcugaggcacagcugccgccgugccu

SEQ ID NO: 4197363 - RNA, 67 nt, Human
gggcgcggcggucagcgugggagaggcugcaggcccugcacgccucugcagcugccgggccgugucc

SEQ ID NO: 4197364 - RNA, 79 nt, Human
gggcgcguggcgacggguguaugcucccagccacauuaccugguguggaaguggcucagcauucacuggucuugugccc

SEQ ID NO: 4197365 - RNA, 67 nt, Human
gggcgcucaccugccugcaaaugccgaaggccaggcggcuaggcucggaagcagcagggagccgccc

SEQ ID NO: 4197366 - RNA, 87 nt, Human
gggcggagaaggguccauugaaucccauccaacugcaucugugcccuucagaucaggauuacacggggaugcuaaaucuccuagccc

SEQ ID NO: 4197367 - RNA, 60 nt, Human
gggcgggauggcaggaggaggagggaaacugacccuacgcgccucugcgcuguccugcuc

SEQ ID NO: 4197368 - RNA, 64 nt, Human
gggcgggccugucgucccagcuuccgcucuccagcauuuuccuaaugcugcuggggcgccgucc

SEQ ID NO: 4197369 - RNA, 101 nt, Human
gggcggggcggggcggagcgggagcugcgggauuccggcuucaggggcggggcaccggccucugggcggagaucugcugccgcguucuacccuuccggccc

SEQ ID NO: 4197370 - RNA, 58 nt, Human
gggcguaucaccugaggucaggaguuugagaccagcuuggccaacauggugaaacccc

SEQ ID NO: 4197371 - RNA, 75 nt, Human
gggcgucaccuuggagacagcagcugaggagcucaaauagguguuaccguggaagcuccugucucaagggagccu

SEQ ID NO: 4197372 - RNA, 75 nt, Human
gggcgugagagcaguuaacugggcucugaucccaucucugagaucuugagcaaguugcauccccucucugagccu

SEQ ID NO: 4197373 - RNA, 76 nt, Human
gggcgugaggcucacugccugggagagggcagccagcaccgacugcucugccagcccaaggcgcagccguccgcuc

SEQ ID NO: 4197374 - RNA, 56 nt, Human
gggcgugauuuggagucugcuagccaggaggccacaggagaaacacaggucagccc

SEQ ID NO: 4197375 - RNA, 115 nt, Human
gggcuaaagucaaggugucagccgggcugguuccuucuggaggcucuaaggggagaaucuauuuauuugccuuuuucagcuucuagaggcugccuguauuucuugacuugcaccc

SEQ ID NO: 4197376 - RNA, 115 nt, Human
gggcuaagaucaagguauuaguagggcuuguuccuucuggaggcuguaaaggagaaucuguuuccuugcuuuuuuucagcuuccagaggccaccccauuccuugguucauggccc

SEQ ID NO: 4197377 - RNA, 55 nt, Human
gggcuaagcagagugggaacagggaccaacgccaccugcuuccagugcucagccu

SEQ ID NO: 4197378 - RNA, 59 nt, Human
gggcuaagcucgcccagggccaacaaacgcugagcucuccacccgggccggcaaggccu

SEQ ID NO: 4197379 - RNA, 60 nt, Human
gggcuacagaaaaucagccacaggccgcauuuggccauugggcuguaguuuuuugacccc

SEQ ID NO: 4197380 - RNA, 71 nt, Human
gggcuacagguauauagaugaaacaagauugccuuguuuauacuauucuaucuacuuuguaccuguuuucu

SEQ ID NO: 4197381 - RNA, 85 nt, Human
gggcuacgcaaagagugggcucuggacaaacccuugcuuuuuccugguccaaaaaggcugagggccgcauagggucauacucccc

SEQ ID NO: 4197382 - RNA, 64 nt, Human
gggcuagaaguuagcuagagaaaugcuggccucaaaaucugcucuucuuacuaauuuccagccu

SEQ ID NO: 4197383 - RNA, 57 nt, Human
gggcuagggaaggcaggcuugggagcagcauccucaucagccucagucuguggaccc

SEQ ID NO: 4197384 - RNA, 73 nt, Human
gggcuaggggcucagggcaguauggcugagagcuggucccccuuggaggucaacuguucuguggaccuagccu

SEQ ID NO: 4197385 - RNA, 59 nt, Human
gggcuauagcacuauguaugggauccacuuuuuccaguucaugcauacuugcauaguuu

SEQ ID NO: 4197386 - RNA, 59 nt, Human
gggcuauggccugacugugcugccaaacagauugccugggagcuguggggccuagcacc

SEQ ID NO: 4197387 - RNA, 129 nt, Human
gggcuauguggguuuauucuucuagguagauguuuacagagggauuaucuaaggguacaaaaaaucagacaguacuuuuaggacaaaucuuuuucuuuauaucuaggaaauaguagacuuacugcauuc

SEQ ID NO: 4197388 - RNA, 130 nt, Human
gggcucaagagauccuccugaguagcugggacuacaggugugugccaccauaccuggcuaauuuuuuuguauuuuuuguagaaaugggguuucaccauguuucccaggcuggucucgaacucuuggacuc

SEQ ID NO: 4197389 - RNA, 58 nt, Human
gggcucaggaaggcucaaccaggacuuaacagcaguuuccgaagggccuucugagccc

SEQ ID NO: 4197390 - RNA, 61 nt, Human
gggcucaggucagggcaucagcauccaguuuuacagucuuugaggcgccugccuugagccu

SEQ ID NO: 4197391 - RNA, 58 nt, Human
gggcucagucuggcguggaaugaucugugaccacaggcuguaccauaaugacuggcuc

SEQ ID NO: 4197392 - RNA, 59 nt, Human
gggcuccaaaguaagcuuuaguuugaaaacauaucaauaagagccaacacugcgagcuc

SEQ ID NO: 4197393 - RNA, 58 nt, Human
gggcuccaggugcaugccaggcuguggaucugccgagcuuccuagugaccuggagucu

SEQ ID NO: 4197394 - RNA, 56 nt, Human
gggcuccggggucagcagcggagacagagaagaccccugcucaggccaaggagccc

SEQ ID NO: 4197395 - RNA, 55 nt, Human
gggcuccuguuugagaaaaagcccgaagaaugguucauuuccaagaagagagcuc

SEQ ID NO: 4197396 - RNA, 75 nt, Human
gggcucuagucaagaaugaauucgagugaaggaaagcugugugacacuuggccuuccucuauguucauggagcuu

SEQ ID NO: 4197397 - RNA, 108 nt, Human
gggcucuauucugcaucuuucucacucugugauccaggcucacugaguccucauccuuuggacuaucaccagucauuacagcaggcagaaggaggaaugugaugacuc

SEQ ID NO: 4197398 - RNA, 57 nt, Human
gggcucugcgcucagcuccagcgagaccaacaauagcucccgcggggagcggagccc

SEQ ID NO: 4197399 - RNA, 56 nt, Human
gggcucuggggucagacagccuggguucgaaucccagccucacuguuccauagccc

SEQ ID NO: 4197400 - RNA, 57 nt, Human
gggcugaaaggccgccucagaugcuccugcacauagcggaagguggcugaacaguuu

SEQ ID NO: 4197401 - RNA, 117 nt, Human
gggcugagcugcucuggccccugcugcccugauguagaaggcucugagcugccgucagggaagagucacggagcucagaaccuccucaucccacuaggaccccaagcagcuuggccc

SEQ ID NO: 4197402 - RNA, 95 nt, Human
gggcugaucccucccccagcucugcugggucccggggccacagcgucaggccgguggggguggagguagaggugggagagcaggggagagagccu

SEQ ID NO: 4197403 - RNA, 59 nt, Human
gggcugcagagggaggggcucgcagccaguuguucuagcugcuuuccgucugcagcacc

SEQ ID NO: 4197404 - RNA, 80 nt, Human
gggcugcaggaugcgcaagccacacagccuggggggagucagagacgacucagggcugcacuggcuggucuccugggucc

SEQ ID NO: 4197405 - RNA, 81 nt, Human
gggcugcaugccuguccccgccugucugagaaagcaggcggggccucccucugcugucucagaugggccaggccccagccc

SEQ ID NO: 4197406 - RNA, 77 nt, Human
gggcugccaucugagaagcgggagccugugaagaagcaucucucccucgcuaucuucugcuucauccgaugcagccc

SEQ ID NO: 4197407 - RNA, 89 nt, Human
gggcugccugccaggugccagggcgcggcucuggccucccgcugcacaacccacuuugccgccaagcccuguacccggcccagcagcuc

SEQ ID NO: 4197408 - RNA, 61 nt, Human
gggcugcuauggaggaagaaacaccuuaagaugagguuguuuaauaauucuaugauagucc

SEQ ID NO: 4197409 - RNA, 62 nt, Human
gggcugcugccaaucacagccucccagcauccagggcucagaggaagaugggcagcuugucc

SEQ ID NO: 4197410 - RNA, 60 nt, Human
gggcugcuuauacugaugauaaccccccaaaaauaguucucucaauaucaguugcagccu

SEQ ID NO: 4197411 - RNA, 60 nt, Human
gggcuggagaugcuuauggagaguuccagggaauguuucuucucaguaggcuuccagcuu

SEQ ID NO: 4197412 - RNA, 126 nt, Human
gggcuggagcagaugauuuuagaagucucuuucaguucugauagucucugauuuuguggaauaguagaucucaacacuggaaguacaucagagucguguggaacuugugaaaaacuguuccagucu

SEQ ID NO: 4197413 - RNA, 87 nt, Human
gggcuggagggcugcuggucugggcccaggccaagaaaauaucugaaggccagauuccaggccuggggccaaguucucaaagugccc

SEQ ID NO: 4197414 - RNA, 99 nt, Human
gggcuggaggugguggagcugcccugggauggucugugcgcagagggcgcuggagacccucucuggguguucuuggagcugccauagcugguccagccc

SEQ ID NO: 4197415 - RNA, 80 nt, Human
gggcuggcacugguguucgggcucguuuugcaugugcugccucugugccuguaacugguccugaacagcccagguuaccc

SEQ ID NO: 4197416 - RNA, 63 nt, Human
gggcuggccaaucacggcacugaauuccucuugcuagcgauucauguagugauugagucacuc

SEQ ID NO: 4197417 - RNA, 100 nt, Human
gggcuggcugaggccccucuaugugcaccugggugggcagucggugcaggugcaggccucacagacgcauccucagguagaagagguuucagaggagccc

SEQ ID NO: 4197418 - RNA, 108 nt, Human
gggcugggacuuuugauuugucauguauguaaaguugauauuuauuuguugugucucuggcuuguuaaugcauauugcaagucucuaccaacugagagucauaagccu

SEQ ID NO: 4197419 - RNA, 99 nt, Human
gggcugggcaaucucccugucaguguuuauugcgguguguacuaggucuuaugcugcaugcuauggugauacugagagguagaagacagaauccugccc

SEQ ID NO: 4197420 - RNA, 92 nt, Human
gggcugguccucagagagugggcccacugccuucagccugaggucaagcagccuaggucugagucccagggguacccucuuuccuccagucc

SEQ ID NO: 4197421 - RNA, 82 nt, Human
gggcuggugcaguagaagagcuuccaccuggggcugcgagaaagccgccugcagccagggaguucucuccucauugcagucu

SEQ ID NO: 4197422 - RNA, 76 nt, Human
gggcugguggaggggaaagugugaggcugcgcucuaagagaugcaggcgccucggcccuucccgccuccgucaccc

SEQ ID NO: 4197423 - RNA, 61 nt, Human
gggcugugccucaggugggguccacauagucugguguggucaucucuccugggccagcgcc

SEQ ID NO: 4197424 - RNA, 102 nt, Human
gggcuguggagaaccucccgugccgucucacaggugcacguggcugugggccgcuccaaggucaggcucuauguggacugccggaagguggcugagcggccc

SEQ ID NO: 4197425 - RNA, 80 nt, Human
gggcuguggcaauucucugggaaagauugugcaggcugugaccgagcccgccaagauuuuccagacccuugcaaccaccc

SEQ ID NO: 4197426 - RNA, 55 nt, Human
gggcuguguaaugugcucuuuucccaacaccaaagggugaguauaaugcaagccu

SEQ ID NO: 4197427 - RNA, 55 nt, Human
gggcuguguccacaaggccugcccugccagcggcacugaaccaggacacaagccc

SEQ ID NO: 4197428 - RNA, 72 nt, Human
gggcuguguccccgcugccuccccuuugaccuccccuuugaccucugcgggagggagcuggccacacagccu

SEQ ID NO: 4197429 - RNA, 87 nt, Human
gggcuguuagugaauaauauuguuuauaaaacaaugcacccagauaaaugucaagguauuauaaaaaguauuguuuauuaucagcuc

SEQ ID NO: 4197430 - RNA, 60 nt, Human
gggcuguuugcauauguuuauagaguauuuaguuuacucuaaaagaugacaagacagcuc

SEQ ID NO: 4197431 - RNA, 97 nt, Human
ggugcucauucagagaggggcugucaucugggagccugugccccuggguccucgaggguuauggcuugucccuggucaguccugucugaucgaggcc

SEQ ID NO: 4197432 - RNA, 101 nt, Human
ggugcuccaggggugguaugaacaacaaaauguagaagcugacagugcuguccccaccuacuggggacauaccacuucuauucaugcugcuuaaggcuacc

SEQ ID NO: 4197433 - RNA, 72 nt, Human
ggugcuccgggcccaccugacugggcguccucugagucagggaggugccagugcugugguccccgcgagccc

SEQ ID NO: 4197434 - RNA, 59 nt, Human
gguggggaggggcuggcaccaggcagcacugccuggcccugcuuaugucucucuuggcc

SEQ ID NO: 4197435 - RNA, 102 nt, Human
gguggggcgccaggauggcuccugggggugcuccugccgccuuccuucacggcacuuacaaccggcgggacccccagggaccaccccucagggcgccccccc

SEQ ID NO: 4197436 - RNA, 67 nt, Human
gguggggcuggccucuuugcaccucuuucuuguuaccugacagggcugcagauagccagccaccacc

SEQ ID NO: 4197437 - RNA, 59 nt, Human
gguggggcugggagaggccccucuguggagcucggaacagucgcuuuccuugccccucc

SEQ ID NO: 4197438 - RNA, 56 nt, Human
ggugggggagaugcuuagguccggggaaucucugagauucucggcuuccccucucc

SEQ ID NO: 4197439 - RNA, 100 nt, Human
ggugggggaggcagguggagaggaacccagacagggcuuugcagccagguugguucucagaguuggagucuggacuuccuugcuaacuugcucucugacc

SEQ ID NO: 4197440 - RNA, 76 nt, Human
ggugggggcuuaaagcaacaauaguccuggaaccgauaacaguguuccuggaacauuggcauuuuaaggcuucacc

SEQ ID NO: 4197441 - RNA, 129 nt, Human
gguggguaaugaggugcauaugugaaaucucggugcccaugucucugcucaaugagguaucuaucagcuguuugggacuuuaggugagaaggcauuuauuucacucacugauguugaaaucauccuacc

SEQ ID NO: 4197442 - RNA, 61 nt, Human
gguggguauugaauacaggugugcuucaucccauuccccagcugucuuucauuaccucauu

SEQ ID NO: 4197443 - RNA, 56 nt, Human
ggugggugagcccugggagcugagucugcggcccggcucugcgcagcucaccugcc

SEQ ID NO: 4197444 - RNA, 101 nt, Human
gguggguggggacaaggcuuuggcuaagcaugcuccagcugcaggcgcccucugugugugcuguuggaggugcuggagccagaacuuggucuugaccugcu

SEQ ID NO: 4197445 - RNA, 64 nt, Human
gguggguggugaagucugguuuaagacuauccuuugggucuaaacagccucuuaccaacuuccc

SEQ ID NO: 4197446 - RNA, 83 nt, Human
gguggguguccacagcaucccagagcccagagcugggaccuucugcugcccuagcugcacugggaccugcuccagcauccucc

SEQ ID NO: 4197447 - RNA, 93 nt, Human
gguggguuuaggggagcuguccugugcacuguagcauguuuaacagcauuccuggagacuacacacugagugccauaggacccucugcccacc

SEQ ID NO: 4197448 - RNA, 61 nt, Human
ggugguaguggugguguccaaauuccugacucuuuuguuuggaacacuuucaguagcuauu

SEQ ID NO: 4197449 - RNA, 75 nt, Human
gguggucaaaacuugucaccauauuucauuuugaacaauaucaaacuaagugugggaggcagaauguugaccccc

SEQ ID NO: 4197450 - RNA, 61 nt, Human
gguggucaggcagugggagagaacuggaguccuccucaguucucacugcucucugaccacc

SEQ ID NO: 4197451 - RNA, 68 nt, Human
gguggucauggaagguccuaccuagaagacgauaucugagcuaggauaguuaaugaugauuuugcacc

SEQ ID NO: 4197452 - RNA, 62 nt, Human
gguggugaagucugcaggcucuaaaaccagaaaacacagguucaaguccuggcucuaccacc

SEQ ID NO: 4197453 - RNA, 59 nt, Human
gguggugugaucuccucaacuagacuguaaucugcuuucaggacagggaucacaucauc

SEQ ID NO: 4197454 - RNA, 55 nt, Human
ggugguucacaccuguaacuccaacacuuugggaggcuaaggugggaggaucgcu

SEQ ID NO: 4197455 - RNA, 55 nt, Human
ggugguucacgccuauaaucccagcacuuugggaggccaaggcagguggaccacu

SEQ ID NO: 4197456 - RNA, 55 nt, Human
ggugguucacgccuauaaucccagcgcuuugggaggcagaggcgaguggaucauu

SEQ ID NO: 4197457 - RNA, 104 nt, Human
ggugguuggaggaagacccuuggugaaauguagucuugugagauaugcucacaggggccaacucucagcuugagcuacaugcccaggcuucuaacccgaccacc

SEQ ID NO: 4197458 - RNA, 66 nt, Human
ggugguugugagggugggcuagccacggguugggggaaucauaaugccagcuuucccugcagcauc

SEQ ID NO: 4197459 - RNA, 83 nt, Human
gguguaaggcauuggucuuuuuccaguucccucacuuaucuccaagaaaagagggcucugaaaggaggucacugcuaaacauc

SEQ ID NO: 4197460 - RNA, 76 nt, Human
gguguacacauugucuguuuacuucuugucugaacuaucauauuugaagcugugaaguguaagauaaaugugcauc

SEQ ID NO: 4197461 - RNA, 72 nt, Human
gguguagacucaggcauauaguaggugcucaaugaauucuuauuaaacagagaugccugggucugggacacc

SEQ ID NO: 4197462 - RNA, 114 nt, Human
ggugucacacaggguaaugcugcuuuauuaacuacuccuuuagccuuuugggaaguagagaguguaggagagagguuuuaaauggggucagaagagggcauuaaaaaugacauu

SEQ ID NO: 4197463 - RNA, 92 nt, Human
ggugucagaugcccuggccagccagaaccaaaagcauggaguagacgcuuggcuuuuauuccugguguuggcugggucccuguguccugccc

SEQ ID NO: 4197464 - RNA, 58 nt, Human
ggugucagccugggagccuagcauucuagcccuuugcaaggcugccaggucucacauc

SEQ ID NO: 4197465 - RNA, 57 nt, Human
ggugucagggcuccacucacccucccugcaccacccagggggggcuugcccugcacc

SEQ ID NO: 4197466 - RNA, 58 nt, Human
ggugucaguugcucaucagaguuguucuuuuauuuuauagaugaugcaacugagcucc

SEQ ID NO: 4197467 - RNA, 84 nt, Human
ggugucauaaauuuagcagccagagucugaacauuaggguggcauaauauauccuaugucuccauguguuguuaguuuaucacu

SEQ ID NO: 4197468 - RNA, 72 nt, Human
gguguccagaaagaaguggggauagaggucuuuaaccauaaauauugcagcuucuccauucuucuggcugcc

SEQ ID NO: 4197469 - RNA, 55 nt, Human
gguguccuacugcuugguugcucaguguggguuggggacuuggcaagggaacacc

SEQ ID NO: 4197470 - RNA, 75 nt, Human
ggugucggcuguacaaaggcagggacuucaucuaugugauucacuccugugcaggccugccucacagucagcacc

SEQ ID NO: 4197471 - RNA, 55 nt, Human
ggugucguccuguuguagcugggauacugucucaggccagcagcaugacggcauc

SEQ ID NO: 4197472 - RNA, 71 nt, Human
ggugucucugaaagguauaaauaagacuuacucuuuugcuguaagauuccauaccuuuuaggucagacucu

SEQ ID NO: 4197473 - RNA, 81 nt, Human
ggugucucuguggcccuaggguagggcucuacugcagcccuaggguagagagcuaggccacuggggcuuccagauugcacc

SEQ ID NO: 4197474 - RNA, 55 nt, Human
ggugucuguggccucagcagcugucagagaggagcucagagaaucagcagacacc

SEQ ID NO: 4197475 - RNA, 82 nt, Human
ggugucugugucagggcugagaaugacagggccgggcaaguccaaaccugccucuucucaugccaucgucucacauggcgcc

SEQ ID NO: 4197476 - RNA, 79 nt, Human
ggugucuguugccuccugguuaccucagcagcucccuaggguucacauggcuaguuuagccaggcccagcauggacacc

SEQ ID NO: 4197477 - RNA, 68 nt, Human
ggugugaaaucugaugaauugaccucagauuccccaguucaggacaucaaauugucagauuuuauccc

SEQ ID NO: 4197478 - RNA, 67 nt, Human
ggugugaaugcagguggccgucagaagggcuguccaccuuccuucagggggccgccugcaccagacc

SEQ ID NO: 4197479 - RNA, 112 nt, Human
ggugugagacuguuuugagcauuuuguaaagcugauuagaaagccaaugcuuugccaaaaugaggaguaccagguuaucuaagacaguuuggcauuuggcugaaauugcacc

SEQ ID NO: 4197480 - RNA, 70 nt, Human
ggugugagagaagcugccauggaggagagccuagaauccugaaagucaucuaggauagugaucucaugcu

SEQ ID NO: 4197481 - RNA, 77 nt, Human
ggugugagauuuuccagcaugaugcucacacaaaaccccgaaugugagguugggggugaguacagcaugcuggcgcc

SEQ ID NO: 4197482 - RNA, 121 nt, Human
ggugugaggaauuggaaagcucagaaauggaaaauaguuaacguucagaguagcagaugaacacagcucucacauuugcauuuucccuuucguucugacucaucuuccccucuccccaccc

SEQ ID NO: 4197483 - RNA, 70 nt, Human
ggugugaggacuggggcuggcacggcagcaggcaugccagggcaccaugggcuggcugccuuaucacacc

SEQ ID NO: 4197484 - RNA, 117 nt, Human
ggugugauugaaagagauaaugugucugaaagugcaauguaaauuguaauacucuauauacaugucauaguuauuauuguuacuaucagcaccaucaucaucauccucuagcacauc

SEQ ID NO: 4197485 - RNA, 81 nt, Human
ggugugcaggaaguagagggcguuauacugggugaaguggguggacucuacccagagcuaugaccugauuugugacgcacc

SEQ ID NO: 4197486 - RNA, 55 nt, Human
ggugugcauggcacagggcuuguucuaacgagugugcagugagcagugcagcacc

SEQ ID NO: 4197487 - RNA, 65 nt, Human
ggugugccuggggcuuagcugcucucagggaagcugccccucugcccagugcaaguccccacacc

SEQ ID NO: 4197488 - RNA, 118 nt, Human
ggugugccuuuuaccagcccaagcuacuuagaaagcacaguuggugcaugauuuaucucccuguucaugcccaugcuuagcauugugcuuuguauuuggcuagugcugaagaaauacc

SEQ ID NO: 4197489 - RNA, 58 nt, Human
gguguggcagcagaucagacugaaaaccaagcaggugaaagucuucaucugccaggcc

SEQ ID NO: 4197490 - RNA, 60 nt, Human
ggugggucacuugaggucaggaguucaagaccagccugaccaacguggugaaaccccauc

SEQ ID NO: 4197491 - RNA, 81 nt, Human
ggugggucugugguuggcagcucaaugaaacaggagucugaggaugaagccuggugucugggcagcuucugcaugcccacc

SEQ ID NO: 4197492 - RNA, 87 nt, Human
gguggguggguagcguggggcagaauugggagagagacacagugaccgggugucccaguucccaggguugcuaacugcucacgugcc

SEQ ID NO: 4197493 - RNA, 61 nt, Human
gguggguguggguaagagggacagagccauaaagggcagcucuuccugcuccacacucccc

SEQ ID NO: 4197494 - RNA, 71 nt, Human
gguggguuaugaagggcgaaggaccucuuagcaggacacucagcugagguccagcauucgccuaauccacu

SEQ ID NO: 4197495 - RNA, 71 nt, Human
gguggucaggacauucuggcggucaggacaccuuggugacgccguucccugcugagagugcucuccccacc

SEQ ID NO: 4197496 - RNA, 69 nt, Human
gguggugaucaggucugaacagggagguccaugcacauaugaaauuucuuccucucaggcuuucccacu

SEQ ID NO: 4197497 - RNA, 83 nt, Human
gguggugccaaggugcuaagggcaugaacccucaucuuccuaggccaguuugcauguaucuuaauugcuuuggagacacuauc

SEQ ID NO: 4197498 - RNA, 58 nt, Human
gguggugcugguguucagaugcuaccucuucgguacaaauguacacuuguauaaaucc

SEQ ID NO: 4197499 - RNA, 62 nt, Human
ggugguggggagcccugggaaagcugagaggggauacaguuggcagggccuaccccaauauc

SEQ ID NO: 4197500 - RNA, 73 nt, Human
ggugguggggucguaggugcccgccagguaguagagguccugccgguccuggcacuugcggcuccgggccauc

SEQ ID NO: 4197501 - RNA, 81 nt, Human
ggugguggugccacuggcaucuaguggguugaggucagggaugcugcucagcagccuacaaugcacagaacagcccccacc

SEQ ID NO: 4197502 - RNA, 66 nt, Human
gguggugucaaacauucuagcuguucugauuuucaauuaguuucauugagauguuugcuacccacu

SEQ ID NO: 4197503 - RNA, 65 nt, Human
ggugguguguuuucuucauucugcagggauccugcuagauggagcagaauagcuaugcugccacc

SEQ ID NO: 4197504 - RNA, 55 nt, Human
ggugguucacgccuauaaucccaacacuuugggaggccgaggcagguggaucacc

SEQ ID NO: 4197505 - RNA, 55 nt, Human
ggugguucacgccuauaaucccagcacucugggaggccgaggcgggcggaucacc

SEQ ID NO: 4197506 - RNA, 55 nt, Human
ggugguucacgccuauaaucccagcacuuugggaggccaaggcagguggaucacu

SEQ ID NO: 4197507 - RNA, 55 nt, Human
ggugguucacgccuauaaucccagcacuuugggaggugggugcggguggaucacu

SEQ ID NO: 4197508 - RNA, 77 nt, Human
ggugguuccuguccauguuaagccccuugcugcagagaugugcuuguggcugggguugaagccuggcugugagcucc

SEQ ID NO: 4197509 - RNA, 60 nt, Human
ggugguucgguggaauggacugcaacgcauuagauacugcuguuauucuuccaggccacc

SEQ ID NO: 4197510 - RNA, 73 nt, Human
ggggcugccaugguugauaaaugcuugagguuugguugaugaucugaggcccaguucaacucuuggcuucccc

SEQ ID NO: 4197511 - RNA, 75 nt, Human
ggggcugcucgccgcgcguuucggagucccggauacgcggcggagagcgggacgcgcgguccacgggcaagcccc

SEQ ID NO: 4197512 - RNA, 82 nt, Human
ggggcugcuucauucuuaucucucucugcagcuuucucugcuauuuaaucugcauggaggaagaugaaugcaccacaguucc

SEQ ID NO: 4197513 - RNA, 61 nt, Human
ggggcuggcauaugcaguuguacaccaugguguuuuacaaagcacgagugccauggacccc

SEQ ID NO: 4197514 - RNA, 60 nt, Human
ggggcuggcucacuaagagacuccuggcacuguguugagucuagcauggagccagcgccc

SEQ ID NO: 4197515 - RNA, 93 nt, Human
ggggcugggggcugggcaggcccugaggagcugagcggggagggcuggaaaacaggacucuccuccaacagcccugccgcugccuccaacccc

SEQ ID NO: 4197516 - RNA, 65 nt, Human
ggggcugguguuugcugaagcuggagccaagguggccacccauccucagcucaggacucagcccc

SEQ ID NO: 4197517 - RNA, 96 nt, Human
ggggcugucagugcuaaccucagagcucuauguucauggagggaugacucaguuacauccccagauagcuggguucucgguuggucaauaggcccc

SEQ ID NO: 4197518 - RNA, 67 nt, Human
ggggcuguguccuggccaaggccuugcuugcagcaaaaggcagagcuggggucuagccaggagcccc

SEQ ID NO: 4197519 - RNA, 70 nt, Human
ggggcuuccagcgcccgccgguggccgggacccacuaaagcccccgcagccgaggagugcggggagcccc

SEQ ID NO: 4197520 - RNA, 79 nt, Human
ggggcuucccaagggcuuugggcuuuccugggcucucccaaaaggaguccuggcccaaucugcccaugaugauggcccu

SEQ ID NO: 4197521 - RNA, 62 nt, Human
ggggcuugcuuaaggucacccgguucuuaaguggcagggcuggggccggacagcaaagccuu

SEQ ID NO: 4197522 - RNA, 81 nt, Human
ggggcuuggaggcccaaugcuucccuccuucuagccaggcugggcugcagggaggggcagcagugggucaggaaaggcccc

SEQ ID NO: 4197523 - RNA, 65 nt, Human
ggggcuuggaugcucagcuuggcccuuuuuggaccuccaagauguggugggcugaguuuggcccu

SEQ ID NO: 4197524 - RNA, 61 nt, Human
ggggcuuguagcucucuuucguucuaaaagauuuuaaaacagcagaaacugcaagcuaccc

SEQ ID NO: 4197525 - RNA, 60 nt, Human
ggggcuugugucaaccuguggccggguggggaugcuccuucccagcugguaggcugcccc

SEQ ID NO: 4197526 - RNA, 61 nt, Human
ggggcuuuucaggggugcagaggccaggcuucaggugggucucugugaguggaaggcaccc

SEQ ID NO: 4197527 - RNA, 68 nt, Human
ggggcuuuugacagcugagccccaggcaagcacgacacucggccuccugguaauuagcgaaaggcccu

SEQ ID NO: 4197528 - RNA, 76 nt, Human
gggggaagcagauuucugagucaaucaaguuugauuuuauuugaauuauggaauuuuuagagaaguguuuuauccc

SEQ ID NO: 4197529 - RNA, 109 nt, Human
gggggaaggugacucaccuggagaguggaguguguguguguguguguggguguggguguacacacaugcauaagccuucccuucuucuagagugggugucccauccccc

SEQ ID NO: 4197530 - RNA, 127 nt, Human
gggggaaucccgugcugaaugcaggagugccgggguuccuggguuuucugccgauuguuccagguucaggagcugggagggagcagagaacccaaccgccacccucccguaguccacgggugccccc

SEQ ID NO: 4197531 - RNA, 55 nt, Human
gggggacaggcuaaccaggccgugugugagagcagccuuugguuucuuguccugc

SEQ ID NO: 4197532 - RNA, 130 nt, Human
gggggacaugacagagcaugugucaaggggaucagucggcuccugcucagggcucugggaccagccucaggaaggaagcagggagcccagggaagggacgauugcuuuguaaaucacagcgcucucuccc

SEQ ID NO: 4197533 - RNA, 77 nt, Human
gggggacgacacagcgugugccucgggguacacggggccauaggugaugcugugugccccggcacauucuugcccuc

SEQ ID NO: 4197534 - RNA, 129 nt, Human
gggggacugcuggugggggaugacuggcagaggaugugcaggugcagcuggauggaagcccuuggcauuggggcuccugucaugcauccaaauccccagugccccuauuccuccacccaggucauuccu

SEQ ID NO: 4197535 - RNA, 88 nt, Human
gggggagaaguuggacaguuugggaagggagaguggucugcucugccaccucaaucuuuccuuucucuggacugcagccacauccacc

SEQ ID NO: 4197536 - RNA, 56 nt, Human
gggggagacuguccaggguuggggggaaacugucuuugccuggaccugucuccuuu

SEQ ID NO: 4197537 - RNA, 98 nt, Human
gggggagagugucaggugcuugcuguaacaagcccuuggcaaguauagaaacaguuuaaguguuaaggggauauagcagggcccugacagcaucugcu

SEQ ID NO: 4197538 - RNA, 63 nt, Human
gggggaggaguucagaccagaugccaggcacugugccugcauuuucucaaugaacccucuuuc

SEQ ID NO: 4197539 - RNA, 59 nt, Human
gggggaggguggcgcaaggagaggacaccucucuccuggcccugucgccaucuucccuc

SEQ ID NO: 4197540 - RNA, 55 nt, Human
gggggauagguuuggaagagguggccauaagccauucauuagagcuuaguccucu

SEQ ID NO: 4197541 - RNA, 74 nt, Human
gggggauccgggcgcagccaauccuggcccuaggauuguguuggggggcuuggcaggcggugucccgacccccc

SEQ ID NO: 4197542 - RNA, 60 nt, Human
gggggaugugggaggagaaaaagccauuuauucuuuuuggucguuccucucacauuuuuu

SEQ ID NO: 4197543 - RNA, 60 nt, Human
gggggcaagcuauuugaccaguuccucugugguuagaggcacugaaggaagcuugcgcuu

SEQ ID NO: 4197544 - RNA, 57 nt, Human
gggggcagaauguacucuugucugaauuauuagcauuugguguugguucugccaccc

SEQ ID NO: 4197545 - RNA, 56 nt, Human
gggggcaggaauaaaggacagcuguauugauggcccaguuuucugaucuugccccc

SEQ ID NO: 4197546 - RNA, 64 nt, Human
gggggcaggagaaaaucgugucguugagcaauaaacagaagagugguccuucuuuacugccucc

SEQ ID NO: 4197547 - RNA, 55 nt, Human
gggggcaggauggagaagagagagacuugcugguccugacccaaucucugucccc

SEQ ID NO: 4197548 - RNA, 55 nt, Human
gggggcaucaucugagcucgguugucccucagcagccugggccagagcuguccuc

SEQ ID NO: 4197549 - RNA, 55 nt, Human
gggggcaugagauggagcucaccugaguggaugcgccucuccaaauccugccuuc

SEQ ID NO: 4197550 - RNA, 90 nt, Human
gggggccacagagcacacccguggagaagcaggagcgggcccugggccuccucagcuuggccacggaguugcugcccugccuugguuucc

SEQ ID NO: 4197551 - RNA, 99 nt, Human
gggggcccuccaggucgggccgggcuguggagaagggguguaagcggucacgaccccgcuccuugcagccucuggccuccuuaugucuggagggcuccc

SEQ ID NO: 4197552 - RNA, 80 nt, Human
gggggccgagaacugggacuuuguaggccaguugauccgacacccucaucucgcccgcaaagacccagcccucagcuccc

SEQ ID NO: 4197553 - RNA, 115 nt, Human
gggggccugugcagucgugauuguuaauagaauucagaauauccguuuaaguuugcuuucaaaguuaaauagaaauucuggcuuuuuaaagugucuuugaaaugaacuggcuuuc

SEQ ID NO: 4197554 - RNA, 68 nt, Human
gggggccugugcugagaaccuggcuggcugaaggagaggaaccaccgaggcugagcaugaaggccgcc

SEQ ID NO: 4197555 - RNA, 75 nt, Human
gggggcgaaaguucauuccugugaggacagcccgcuccuuggcaugucacaacagaggaacugaauucugccucc

SEQ ID NO: 4197556 - RNA, 62 nt, Human
gggggcgaugacggugaugaugagaaucccagguucaaaauaauaacgucugucuugucucu

SEQ ID NO: 4197557 - RNA, 57 nt, Human
gggggcggcuucccacggacacguuugaguucuguguucucagggauaacuuccccc

SEQ ID NO: 4197558 - RNA, 81 nt, Human
gggggcuaugggaaguguuagaagauuuuagggacagauuuugaagagucugaaucuauacugcccagugcaguagccccu

SEQ ID NO: 4197559 - RNA, 70 nt, Human
gggggcucaguccuuccuugccccuugggcugcccuucaggguuaaguagagggucccagcugagcucuc

SEQ ID NO: 4197560 - RNA, 60 nt, Human
gggggcucaguuguugucuuacagaaaaaaaccuuguaaaggcaauucagcaagccaccc

SEQ ID NO: 4197561 - RNA, 72 nt, Human
gggggcuccugcugggagcccugacuagccugggagggucccaggaacuuggcgggccccaaggaagccccu

SEQ ID NO: 4197562 - RNA, 80 nt, Human
gggggcugaaaacuggggccugaaagguucucgcccagcucuccugggccggagcggacagguccuagcagacagucccc

SEQ ID NO: 4197563 - RNA, 62 nt, Human
gggggcuggacugauggaccacaagggaauggagcccugggauaccagacaccagauucccc

SEQ ID NO: 4197564 - RNA, 88 nt, Human
gggggcuggcugcauggcacagagugcugagauguuugggacaaagauggcucuacucuggcucaccauuuucacucucugcgccccc

SEQ ID NO: 4197565 - RNA, 91 nt, Human
gggggcugugcacacaaaagguauggccucucccucugccagccacgucuguagggaaggagaccaagccacagauggaugcacaacuccc

SEQ ID NO: 4197566 - RNA, 79 nt, Human
gggggcuuggugcugaauuggagaugcuccugcccuuuggucaccugaugcaggugcuuuccucagaucuaccucccuc

SEQ ID NO: 4197567 - RNA, 118 nt, Human
ggggggaaagauuugcaaagugugagggguaaauuuaaauuuucugauggagagcucuuucaguugcuaauagaagauuugggaaaauguuaucccucaaagaaaaaaaauucccuuu

SEQ ID NO: 4197568 - RNA, 109 nt, Human
ggggggcaaggagcuaaugacugcaccuugggaagcgccaguuggguaauuaauucacaguucugagcuuucccagaaggaaaaagauaaauuguucacuugcacuccc

SEQ ID NO: 4197569 - RNA, 103 nt, Human
ggggggcugcagcucagauuuuguuuccuuucuauacaggaugccauauggcacgcugucccuggggagaggacugacagugcuguaguugccacuuaccccc

SEQ ID NO: 4197570 - RNA, 98 nt, Human
ggggggggauugagaggggaagauuauacuuuugaauaucucaauauuugauaauuuuuaauaguauuuuuuccaggcucagaauaaugucccuucuc

SEQ ID NO: 4197571 - RNA, 79 nt, Human
ggggggucggggggaggaauggaggcuucuggggguugcucuggaccaggaagccuuuuucuuugacccuuguccccuc

SEQ ID NO: 4197572 - RNA, 71 nt, Human
ggugaauggucaaguuaacugccucucagcccuucugucucagaggcugugaagguuaaagacgaugcauc

SEQ ID NO: 4197573 - RNA, 55 nt, Human
ggugacaggaacauaaauguaggagugauguauuaugucuacauggguccuggcc

SEQ ID NO: 4197574 - RNA, 102 nt, Human
ggugaccaacuauccugguugguccaggacuugugauuccugggacauugaucuuuaaugcugagcugggacaguccuggguagacaggauggcugaucacc

SEQ ID NO: 4197575 - RNA, 87 nt, Human
ggugacccgcacgugcagagccccuggguugggagcuggcagaagcacagcaccagagcuaugggccugcagaguucgggggaagcc

SEQ ID NO: 4197576 - RNA, 66 nt, Human
ggugacccuggaacacaucucgcugcagggcaaauguccuuggggugucauguuccucugguuucc

SEQ ID NO: 4197577 - RNA, 66 nt, Human
ggugaccucccguggccugagguguucauacguggagugguggacaccgcagccaugaaagggacu

SEQ ID NO: 4197578 - RNA, 60 nt, Human
ggugaccugggucccagccccuggccccaaggauggggcauggggcucugauccuucacc

SEQ ID NO: 4197579 - RNA, 111 nt, Human
ggugacggccaccucugcccaucugccccucgacgcaaugaaggggacggccaccucugcccauccgccccucgaugcaaugagggggaaggucaccacugcccauucgcc

SEQ ID NO: 4197580 - RNA, 62 nt, Human
ggugacuaaugugucccaguuuucucaucaaauucccaggaaauuugggacgauuggccacc

SEQ ID NO: 4197581 - RNA, 84 nt, Human
ggugacugauuuugacucugcuaggaaaaucucaggauggaaauuuccugagcugacaguaggucaugcugaauuagagacauc

SEQ ID NO: 4197582 - RNA, 55 nt, Human
ggugacugcauuccccaggugcaaucuuucagcaugugaccugauguaguacauu

SEQ ID NO: 4197583 - RNA, 83 nt, Human
ggggugaacccggcgggcacucagggucgaggugggggccaucacucccuugagcccugaggucccuacuggagggucacccc

SEQ ID NO: 4197584 - RNA, 74 nt, Human
ggggugacucccagcuccugggccccacagagaguccauguucucagugcaguggcugagcuggaggacgcccu

SEQ ID NO: 4197585 - RNA, 90 nt, Human
ggggugcacgcagccucagggacuccaugcugcagcuccuccgcggaggaaccacugaacggggaauccuaugaaagcugcugucccacc

SEQ ID NO: 4197586 - RNA, 90 nt, Human
ggggugcaguaugcagagcuaggccaucucugucguccuacaagaaccaggcagcccugagcaaggcuuuuaacaugcaagguguacucc

SEQ ID NO: 4197587 - RNA, 61 nt, Human
ggggugcuuuggucagcaauauuguggggaguuacuccagaccacccuggccaugcacccc

SEQ ID NO: 4197588 - RNA, 74 nt, Human
gggguggaaggcagcagucucaggcugauuggucuguccaggaagcagcuuuucucugagaccuuuccacaccc

SEQ ID NO: 4197589 - RNA, 58 nt, Human
gggguggaggcaguuaaauuuucaccuguauaggaaauaagucugucugcuuucccuc

SEQ ID NO: 4197590 - RNA, 68 nt, Human
gggguggggaacacuguguaagggcagggguagcaacuuuccuccaggauaccuguuccuauaucccc

SEQ ID NO: 4197591 - RNA, 108 nt, Human
gggguggggaggcugagaguggcucccaaaaucccuccccaggcaaguccuggauacaagccaggccagccucaggcagggaccgcacacucaggccucucucacccc

SEQ ID NO: 4197592 - RNA, 67 nt, Human
gggguggggccugcuccagcggccacggggaggggccgggggucgcuagaaggaggccgaccagccc

SEQ ID NO: 4197593 - RNA, 70 nt, Human
gggguggggcuggccuggggugagggcuggagggcuccgcugcagcucccugguagccaugcucuccccc

SEQ ID NO: 4197594 - RNA, 68 nt, Human
ggggugggucccuucuugcuaugcucagaggucuaggcucucuggcuuggcacggagaugcccagccc

SEQ ID NO: 4197595 - RNA, 55 nt, Human
ggggugguggacucagcaucaugggcaguauagcucccagccucucuuccacccc

SEQ ID NO: 4197596 - RNA, 90 nt, Human
ggggugguggcggaggcuccaggaagcccagccuccucccucacucacaccugcggucgccaaaccuggggcuuaugccauugccgcccc

SEQ ID NO: 4197597 - RNA, 60 nt, Human
gggguguggcuggcaacccauugucaccguguaaguacaguauaacuccaugccacccuu

SEQ ID NO: 4197598 - RNA, 83 nt, Human
gggguguugucuuucuugguauaaagcagggauauccaaucuuuugacuucccugccuauauuaaaagaagcaaaguugucuu

SEQ ID NO: 4197599 - RNA, 78 nt, Human
gggguuaagaaacuugccugaagucaaccagcuauuaaugagcagagcugggauuucaagcuaagugaauuugauuuc

SEQ ID NO: 4197600 - RNA, 80 nt, Human
gggguuaagacuacauuucucaguaccugaauuggcuuaauucuuggauuaaauggaauaaucaguaguucuuaacaccc

SEQ ID NO: 4197601 - RNA, 125 nt, Human
gggguuagaaaugaugcuucagaggugaggucaaggaugaggaaugggagauggaggcacgaaaaccuuacucugccuguaccucuuuuuugcagaaggcagcugagggcaugguaaugagcccc

SEQ ID NO: 4197602 - RNA, 67 nt, Human
gggguuaucaauuacuuacauagccuuccucuaagggaaggcuugcaagugguucauauucgacccu

SEQ ID NO: 4197603 - RNA, 74 nt, Human
gggguucacuaaggucuuuaacaggucuuuuucuaauuauagccaagaagagccuggggaccauggccgacuuc

SEQ ID NO: 4197604 - RNA, 74 nt, Human
gggguucagggggcuuuccuggaaagagggcuagcauugagcuuuagccagucuccuaagagccccugagcccc

SEQ ID NO: 4197605 - RNA, 83 nt, Human
gggguuccugcacccggggccccugaacccgagacuccugcacccgcagcuccugcaccaggggccccugcacccgggacgcc

SEQ ID NO: 4197606 - RNA, 73 nt, Human
gggguuccuuucuacagaugccucuugcccaggcugggcauguuuaaucugcauggagcuuaaagguaacccu

SEQ ID NO: 4197607 - RNA, 59 nt, Human
gggguuugagcugcaguggaggauaccaaagcaccggucuucugagaguucacagcccc

SEQ ID NO: 4197608 - RNA, 63 nt, Human
gggguuugcagcaauggagggcagugcaaaaacaaugccugucaccucuuuggcugcagcucc

SEQ ID NO: 4197609 - RNA, 108 nt, Human
gggguuugggaaauggaaguugcacccuucaccuugccugaagacuauuccuccaggcugggcugaagggugcuuacuuucuuuaucugcacacauuucuugaguacc

SEQ ID NO: 4197610 - RNA, 66 nt, Human
gggguuugggauuuguucacaguaauuuuucugcucugaguccauaguggauccuucaaaaacccu

SEQ ID NO: 4197611 - RNA, 58 nt, Human
ggguaaacaccuguuaaauucagaacauugcaaguuaucugggugcuaguguuugcuu

SEQ ID NO: 4197612 - RNA, 71 nt, Human
ggguaaaggauguguguacaaggaaaggagaagaccauuuccuucucuguaccucacaugcaccauccccu

SEQ ID NO: 4197613 - RNA, 67 nt, Human
ggguaaauguucugauguaggguuuagaaaucaggauuauugucacccuaaccaaacacccuuaccc

SEQ ID NO: 4197614 - RNA, 68 nt, Human
ggguaacagggagguugaagguauuggaguugagagacccaggcugugcaaacuucaaaugauuaccc

SEQ ID NO: 4197615 - RNA, 92 nt, Human
ggguaacaguggauaagaaaugcuacacaagcuccuuauguggagaaaagacuguucuccuauuuggaagccuugugcccauauccaugccc

SEQ ID NO: 4197616 - RNA, 65 nt, Human
ggguaagaacaagcuggggguuccacuagcaugggcugugagaauagaaagagcugucauuaccu

SEQ ID NO: 4197617 - RNA, 111 nt, Human
ggguaagagaugugagcuuuguaccaaaaaagaacuaauucugacuuuuuccacaauuuuaaacaaaagccaggauaaaguuguuuuaaaguuuaaaggguacaauuaccu

SEQ ID NO: 4197618 - RNA, 82 nt, Human
ggguaagaggaagaaauugaauucaugagcuuaaggcaugagcaaugaagccaggagcugaacaauaucuuacuucauaccc

SEQ ID NO: 4197619 - RNA, 71 nt, Human
ggguaaggaggcgagguggugagcagcugagccauguuaacagccuugcuugcccaucucccuccuucacu

SEQ ID NO: 4197620 - RNA, 86 nt, Human
ggguaagugggagucaaauauuccagcuucuuugucccuggguugaacaauucagaggucccuagcaggagugaaccccauugccc

SEQ ID NO: 4197621 - RNA, 65 nt, Human
ggguacaaggagugaagguuuggaaaggggagcagguuuccaaagagucaagccucccucuuccc

SEQ ID NO: 4197622 - RNA, 68 nt, Human
ggguacaagugcacaacaugcagguuuguuacauauguauacaugugccauguuggugugcugcaccc

SEQ ID NO: 4197623 - RNA, 93 nt, Human
ggguacaauauauuucuagcaaccuauggauagagaagagaacauauauucauuuauuuucucaucauuggguugcaaguaugugcuaggccc

SEQ ID NO: 4197624 - RNA, 88 nt, Human
guaaggauucuuacauagagaaguuacaguggaagauaauucacauugauucauugucugcuuugguucacuaugauagggaccuuau

SEQ ID NO: 4197625 - RNA, 80 nt, Human
guaaggguucacuggaacuaagggggcuccagcuaaaaaacaaguuugaaaggcacugaucuuauccaguaucaucuuac

SEQ ID NO: 4197626 - RNA, 57 nt, Human
guaaguaauuuuugagagggugcucuuaaucucuauccucaucaaacuuucacuugc

SEQ ID NO: 4197627 - RNA, 66 nt, Human
guaagugaauagaagcuuuuaaauaacaggagagagaaaaagcugucccaaagccuauacacuuac

SEQ ID NO: 4197628 - RNA, 90 nt, Human
guaagugugugguauaauuucugguacauaguaagaacacaauuaaugcuaguuguuuuuaguagugcuauuacuacuacuacuacuuau

SEQ ID NO: 4197629 - RNA, 62 nt, Human
guaaguuuuccugaaacugaugguguuauuaggcaugaccucgucagacuuagaaaaccugc

SEQ ID NO: 4197630 - RNA, 65 nt, Human
guaauaauacuagucagccuuguucaccaauuccuaugugccaggugcugagcuaguguugccac

SEQ ID NO: 4197631 - RNA, 67 nt, Human
guaauaauuugcuaccuggugggauauugugagguugagugaaucaucagugcuugcaaauuauuau

SEQ ID NO: 4197632 - RNA, 80 nt, Human
guaauacacuacuguagugaugauaauuaaguggcaaauucuacacaguugauugucacucagggaauuagugcuguugc

SEQ ID NO: 4197633 - RNA, 76 nt, Human
guaauacuuuaagacugucugggacaagaugagauggugguuauugcuguuguauaauaguuuugagguuugauac

SEQ ID NO: 4197634 - RNA, 74 nt, Human
guaauaguuuuagcaaaggugucuugggcauauuaucaagaugcuauuagaagccaugcuguuuucauuguuau

SEQ ID NO: 4197635 - RNA, 87 nt, Human
guaauaucauuguaaucauaucuauuuuguaaagguccccuuuguagagaauaaaacaaauuagguguguguuacagguugaauuau

SEQ ID NO: 4197636 - RNA, 59 nt, Human
guaauauccugaacaguugacuguacaaugacuguacagugacagauagggauagaaac

SEQ ID NO: 4197637 - RNA, 64 nt, Human
guaaucccagcuacucgggagacugaggcaggagaauugcuugagccugggaggcggagguugc

SEQ ID NO: 4197638 - RNA, 64 nt, Human
guaaucccagcuacucgggaggcuuaggcaggagaaucgcuuaaacccaggaggcggagguugc

SEQ ID NO: 4197639 - RNA, 63 nt, Human
guaauccuguguguguauguguaaaaaugugucuauacauuuguauauaugcagcauacuuac

SEQ ID NO: 4197640 - RNA, 84 nt, Human
guaaucgggcaucacagcaguucaggccgcagagggcuccaggcucuuuaccuuuuacaagcugugugaccuugggcagauuac

SEQ ID NO: 4197641 - RNA, 64 nt, Human
guaaucucagcuacuugggaggcugaggcagaagaauugcuugaacccaggaagcggagguugc

SEQ ID NO: 4197642 - RNA, 64 nt, Human
guaaucucugcuacuugggaggcugaggcaggagaauugcuugaacccaggaaguggaggcugc

SEQ ID NO: 4197643 - RNA, 89 nt, Human
guaaucugaauauaccugaucaaggcaaaaauguaaguguggucauuaugaguauuucauuauuguuuuuaucagggaaaugagauuau

SEQ ID NO: 4197644 - RNA, 68 nt, Human
guaaugaacaaucuggcaagaacuugaaaaccugacaggcuuaaagguuacaugccagagugcucugc

SEQ ID NO: 4197645 - RNA, 62 nt, Human
guaaugaauggugucuaaagaagguugccucauugugagguaaguuagagcacaauucuuac

SEQ ID NO: 4197646 - RNA, 55 nt, Human
guaaugacaauagacuauccacagcuaccuuuguggaaccuaaaaaugucauugc

SEQ ID NO: 4197647 - RNA, 86 nt, Human
guaaugagugguaguaucuucaauuuauucaaggagaguuuuguugaaugauuuucuuugacauucauugaauauccacucccugc

SEQ ID NO: 4197648 - RNA, 68 nt, Human
guaaugaugaugaugaugggccuugcugagacauagugcagcucuuuaaaccauuucaugauuauuac

SEQ ID NO: 4197649 - RNA, 91 nt, Human
guaaugcgcaugaauuauaaugagaucuuguugauguuauauauuaugauacaacagaaaaugauuauucuuugugauuaccuuauauuac

SEQ ID NO: 4197650 - RNA, 85 nt, Human
guaauggcaauggauuaagcaaaacuucauuugacaaaaauauuuccagguccugaagagguugucuuuauauguuugcuauuau

SEQ ID NO: 4197651 - RNA, 63 nt, Human
guaauggggguugaugagggagggacagugaaaacaacuguaaaaccaaaucaaucuaguuau

SEQ ID NO: 4197652 - RNA, 60 nt, Human
guaauguauuccuuuuucuuucuguucugucuuggguggagaggaagaagaguguauuau

SEQ ID NO: 4197653 - RNA, 110 nt, Human
guaaugugaagccaaggguagagagacugggcuaaguauuaauaauuauuguaaaagugacauuuauuagaugcuuacuacaugccaggacucugcugacauuuacaugc

SEQ ID NO: 4197654 - RNA, 76 nt, Human
guaauguguuaacaugacaauuggcuuaucauaaaaaguuaugaaagcaggaauuguucuguuuuacacaugauac

SEQ ID NO: 4197655 - RNA, 126 nt, Human
guaauuaauacuaacugggauuguuaguacacugcucuguacagggauacuguuacaaauuacaaacaucaguagacagauuucuuguuagacauuguugccuucacagcuaagaguauuaaauac

SEQ ID NO: 4197656 - RNA, 63 nt, Human
guaauuacagguccaaaacaaucucauaguuuuauuuggggguuauuugcauccuguaauuau

SEQ ID NO: 4197657 - RNA, 57 nt, Human
guauugcauuuugaaugcaugguauugauugccagagaaucaguuaaauugcaguau

SEQ ID NO: 4197658 - RNA, 62 nt, Human
guauugcuggguucccgguauguuacucucaucguguacauaucuguuagacacagcaguau

SEQ ID NO: 4197659 - RNA, 80 nt, Human
guauuggaggaaugaauagaguuuuauggaguccaguggagaaaucacagucugcauaugaccuguagugauuccaauac

SEQ ID NO: 4197660 - RNA, 88 nt, Human
guauuggaguguaagagacaaguguggugagagcagucuggcagggcuacuacuguuaugauuuacacagucccuuucauccagcuac

SEQ ID NO: 4197661 - RNA, 66 nt, Human
guauugggggugguggcugggggguggugucuuaugacauuaucucuaggcugccacuuaaaguau

SEQ ID NO: 4197662 - RNA, 100 nt, Human
guauugggguaggaggaaugauuggcaaaggaaaugauuuaagaaacacaauggcaauuucuuagcaaauuuucuuugccucugucuguuauauaauuac

SEQ ID NO: 4197663 - RNA, 81 nt, Human
guauugucauugagaugggcuuuauguucagccuuguaaaccuagcaaggucuggauuuguugcccuucagggaauaauac

SEQ ID NO: 4197664 - RNA, 69 nt, Human
guauuuaauucugugcuucuagguguuucgaauacugaauagagcuuggcacuagaaggcauuaaauau

SEQ ID NO: 4197665 - RNA, 120 nt, Human
guauuuacucagcauuacauuccauuaugguggcaaaagguuaaauacuaucaagugguuugauauuuuaguauuuaaucacuuuugucuugaacgagugaauguuuaguccguagauau

SEQ ID NO: 4197666 - RNA, 60 nt, Human
guauuuacuguuuuauauuguccagguaagaaaccuggagcuuauugggagcagaauuac

SEQ ID NO: 4197667 - RNA, 90 nt, Human
guauuucauucauucguucauucuacagagagugcauacucugugccaagcucugugcuagaacuaagaauauagacaugaacaagauac

SEQ ID NO: 4197668 - RNA, 55 nt, Human
guauuuccacccucaguaaggaauggaaaccugucccgucuggggugugaagugc

SEQ ID NO: 4197669 - RNA, 55 nt, Human
guauuuccauuagugugugcaccuugggcagccugcuggcaccauguggaaguac

SEQ ID NO: 4197670 - RNA, 61 nt, Human
guauuucccccagacucccuggcaaaaugaaaguuagcuggguugggcuugugggaaauac

SEQ ID NO: 4197671 - RNA, 57 nt, Human
guauuuccuggaaugacuagugggugggauaagccuaaaaggauuuccaagaaauac

SEQ ID NO: 4197672 - RNA, 57 nt, Human
guauuucuuggaaauccuuuuaggcuuaucccacccacuagucauuccaggaaauac

SEQ ID NO: 4197673 - RNA, 65 nt, Human
guauuugcaaaucuaaaagagaaccagucgguuuguaucaguucuuuuggguucauugcaguuac

SEQ ID NO: 4197674 - RNA, 59 nt, Human
guauuuggucacuggaguguguggaugagagauuauguugcacuucaguggcuaaauuc

SEQ ID NO: 4197675 - RNA, 64 nt, Human
guauuuuaggaagaguugaguaaauuuaaggauguacuuaauuugcucauuuuccuacuagugu

SEQ ID NO: 4197676 - RNA, 57 nt, Human
guauuuuauggcaugcaguggcaucuugacuaauugugacuaauugugauaaagugc

SEQ ID NO: 4197677 - RNA, 128 nt, Human
guauuuucuguagcuuuguugggauaaagggucuuaaccugccuaagaagauugcaugcuucuggaaggcagggcucauuucuuaggcuccuuuauugccuccacagagguuaacacagagaugauac

SEQ ID NO: 4197678 - RNA, 64 nt, Human
guauuuugagaucagucucgcaguaagauucauguugcucugugaaaucugaacucaaagaugc

SEQ ID NO: 4197679 - RNA, 66 nt, Human
guauuuugcagagccugugauugagggaaaccaaugcucccucuuaaaauuaccuuugcaaaauau

SEQ ID NO: 4197680 - RNA, 90 nt, Human
guauuuugucuacaguuuauaguuguuaugugugagaguguccuucuuauuacauuaugcguaacauuuauuuaaccagaucucuauuac

SEQ ID NO: 4197681 - RNA, 87 nt, Human
guauuuuuaaaauguguuucuguaugguuugugcccauucuuggcguggcuguggcuguacagagaccauuguucuuugaggaauau

SEQ ID NO: 4197682 - RNA, 62 nt, Human
gucaaacuguuuggaacucuuccacauaccagaaauguugaaguuuucuaaaucagaaugau

SEQ ID NO: 4197683 - RNA, 100 nt, Human
gucaaaggauugaguuugacaaggaagauuuacgcugaaguuuaguuaagcuuuagaacagauauuguaacuuuucuaugaaaaacuaauguacacugac

SEQ ID NO: 4197684 - RNA, 77 nt, Human
gucaaaggcccuuuauuacacugaaagaauugcgugacucuguucugcauuuucuuacauguggaauuaaggcugac

SEQ ID NO: 4197685 - RNA, 60 nt, Human
gucaaaggugacaccauucuuuaaaucacucagaccucagaguuugaaguuaucuuugac

SEQ ID NO: 4197686 - RNA, 86 nt, Human
gucaaauggacagagaucauuuaggccugagauuuaggcaaaggcacugcauagaaaguucuagaagacuuuuccauuuuuguggc

SEQ ID NO: 4197687 - RNA, 78 nt, Human
gucaaauuaggcaacuguuugguugaaguaugaacaaguuaaaaaucauguaaagacuauaaaguuguucugauuuac

SEQ ID NO: 4197688 - RNA, 72 nt, Human
gucaacaucagagcucccagcauggaggucucuggcauggcuggacuuacuugcugaggacuggugcuuggc

SEQ ID NO: 4197689 - RNA, 56 nt, Human
gucaacaucggaaagcguguaaaccguucuagcguguugcugugguuggugcugac

SEQ ID NO: 4197690 - RNA, 85 nt, Human
gucaaccagcagauaccgggucagcuucagaggaacuuacauuagcugugccauuuccuuuggagcuugacugguagucauugac

SEQ ID NO: 4197691 - RNA, 59 nt, Human
gucaaccugucacucugaggagagaauucuuuuuauuuccagagucuucgacgguaggc

SEQ ID NO: 4197692 - RNA, 63 nt, Human
gucaacuacagcugccaucuuugccaucucaggcagccuacaggugggggcuguguccuugac

SEQ ID NO: 4197693 - RNA, 79 nt, Human
gucaacugauggagugauggagaaauucugguuucaacauagagaugguaaauaucuccauucuccaacuuagugagac

SEQ ID NO: 4197694 - RNA, 79 nt, Human
gucaagacauuuguaggacagaggaagagaagaaagugucacauuguauuguuucuuuccuguugccugagaugaagau

SEQ ID NO: 4197695 - RNA, 66 nt, Human
gucaagagguuucuuaggggcuuccucuuguaugagguaagagguaagccuggaggcuucuauggc

SEQ ID NO: 4197696 - RNA, 90 nt, Human
gucaagaucggaaugucuggguugggagugauagacugaccagguuaccugcucaucacauguguagucaucccaaucucuguucauggc

SEQ ID NO: 4197697 - RNA, 95 nt, Human
gucaagcauuagauucucauaaggaacgcacaaccuagucccucacaugugcaguucacaauaggguuugugcuccuaugagaaucuaauguggc

SEQ ID NO: 4197698 - RNA, 69 nt, Human
gucaagccagucagcucaguagaugucccaauuaauacacucaaugaucaugcugacaauggcaaugac

SEQ ID NO: 4197699 - RNA, 86 nt, Human
gucaagccugggcuggggaugugagugcuggucgcauuguucuauaagggucacaaggcacauuccuuguccaugaggagcuugac

SEQ ID NO: 4197700 - RNA, 63 nt, Human
gucaaggggaggacacagggccaugaaggugaggggacgauggcccucaguccuuccuuggau

SEQ ID NO: 4197701 - RNA, 60 nt, Human
gucaagugcuacauuggugcuacagauucagacugugcacacaagcaaugcacuuaaggc

SEQ ID NO: 4197702 - RNA, 65 nt, Human
gucaaguucuggguucuggguuauuggggugacugcccucaaacuccuaaucacccaucuuugau

SEQ ID NO: 4197703 - RNA, 67 nt, Human
gucaaucacgccaggaggaaaaauaguggcaugauuuguuaucuguuauuccccuugcuguggugac

SEQ ID NO: 4197704 - RNA, 89 nt, Human
gucaaucauggauaagaauccgauucguguacauuaauuucuuuuacgaaagaugugcaacuugauuugaaucugaaaacaugacugac

SEQ ID NO: 4197705 - RNA, 91 nt, Human
gucaaugauagucaagaaaagguacguauucuguguuauuuuucacuuuauaaaaguagaauaauuggauuacaguuuagacuacauuggc

SEQ ID NO: 4197706 - RNA, 81 nt, Human
gucaaugccugcuuucagaccuggaugugggggccugcugggugccagcccccugcuaggcucugggaauaggacaauggc

SEQ ID NO: 4197707 - RNA, 73 nt, Human
gucaauguaaauauuuucuaaucaacaauuauguccugcaucccgaaugauuacggaagauauucccguggau

SEQ ID NO: 4197708 - RNA, 68 nt, Human
gucaaugucuuuugauacaaguuacagcagagagcagcugcaugaagacuuaaaaaagcaacauugau

SEQ ID NO: 4197709 - RNA, 111 nt, Human
gucaauuuacaguaauaauugaaagcacaaagaacaaguuuuugcuuaauuacuaugugacagacuguauuuuguacuuucguguauaugugauacuguagugcuuuugac

SEQ ID NO: 4197710 - RNA, 73 nt, Human
gucacaaagucaaggcauuucgcuuagagagaaaucugagauuucuguuagcaaaauucuuugaucaaaugac

SEQ ID NO: 4197711 - RNA, 63 nt, Human
gucacaauguuugaguaggagcauaagauuaaaaauauuuuauuagcuuuuagauuuugugac

SEQ ID NO: 4197712 - RNA, 68 nt, Human
gucacacaauaguaagugguccaagauucuaaccucagaucugcuaaccacuguacuauuugaguggc

SEQ ID NO: 4197713 - RNA, 82 nt, Human
guaucagaucaaguaguguuuuuuaugcugaaaaagagcuuacuaguagcuaauguuucugaagauacagcuuugcugauau

SEQ ID NO: 4197714 - RNA, 64 nt, Human
guaucaucuccuagcgugcaucccagccuggagcuggguccacggaagacuuagggggcuuuac

SEQ ID NO: 4197715 - RNA, 88 nt, Human
guaucauuaaaucaccauugccuagaaaaauuccugguacucagccagguuuuuaauccucuggaagcacugacauuuaagugauuac

SEQ ID NO: 4197716 - RNA, 77 nt, Human
guaucauuccugggcaaaaguaucugugagccaggugugccuccacuguaucgcuuguccuucugcuaggaggaugc

SEQ ID NO: 4197717 - RNA, 83 nt, Human
guauccaaggaucuccauugcaauauuuaaugucuugcuuaugaaaguaagaaagauaagguuugcuuggacaucuucaguau

SEQ ID NO: 4197718 - RNA, 55 nt, Human
guauccauguguucgcaucauuuagcuuccacuuuuaagugagaacaugugguau

SEQ ID NO: 4197719 - RNA, 80 nt, Human
guauccuacuuaaauggaaguguauuuaguguucuguuauuaagaauaaugugagcuuugguuuguagucaguaguauau

SEQ ID NO: 4197720 - RNA, 95 nt, Human
guaucuacuaguuucugguauuggggaugugguugagugaagcacacugugucccacugacuucacauccagacacacacaaaugggugagauac

SEQ ID NO: 4197721 - RNA, 70 nt, Human
guaucuagucaaugcuguucaaccaaccagaagcauuuuaaaagagguaggguaacaauuugcuaggugc

SEQ ID NO: 4197722 - RNA, 103 nt, Human
guaucucugccacccacggaguucuaaugacuuuaaaauaugcuaguaaugaggaaagacauaugggauauuauguagagcugagguaggugguaagagauac

SEQ ID NO: 4197723 - RNA, 106 nt, Human
guaucuguacuaguuaacugcucaguuaagcagaggaaauggugaggcuacucuauuucuuuuaaauaacuuugcauuguuacauuugaauccugguauucauuau

SEQ ID NO: 4197724 - RNA, 115 nt, Human
guaucuguucugaucaagugguacuucacuaugcucauuguuaauauuuugaacaacuugguuugggaugcugauauagagcauucuggcucuuggugcagaacauaaaugaugc

SEQ ID NO: 4197725 - RNA, 86 nt, Human
guaucuuuucugcccaggcugaaggaacauccacagauacagauguggcauguuuauuauccuugccuggagcuucuaagucgugc

SEQ ID NO: 4197726 - RNA, 73 nt, Human
guaugacucagcaugaguauugaacuugccugucuucacagaacacauggcucagucucaugacagguuauac

SEQ ID NO: 4197727 - RNA, 86 nt, Human
guaugagguuggugcaaaaguaaucgcaguuuuugccauugaagguaauggcaaaaaccgcaauaacuucugcaccaaucuaauac

SEQ ID NO: 4197728 - RNA, 61 nt, Human
guaugauguguagauacacacacauauauauucagauauguguguguaugcacacacaugc

SEQ ID NO: 4197729 - RNA, 61 nt, Human
guauggaaaucaucugaguaauaaucuggaauucacagguuccaaaugaugguuuucauac

SEQ ID NO: 4197730 - RNA, 60 nt, Human
guauggaugugugaacugguuaguuugggauccuuugcuuguuauucaccacaaccguac

SEQ ID NO: 4197731 - RNA, 72 nt, Human
gucagauuggaacuuguaaauccuucuuuuuuaagacaagcccuaagaaggaacacaaugcuucugugugau

SEQ ID NO: 4197732 - RNA, 79 nt, Human
gucagcagaugggcuuugguuuugaacuacaauaucagaucuuccuugguucuccagccuauuggccuauccugcagac

SEQ ID NO: 4197733 - RNA, 81 nt, Human
gucagcaggggccguuggguggaggaagccggcaggaugcaggcgucccuccaucucagcugcccguuguguagaacuggc

SEQ ID NO: 4197734 - RNA, 56 nt, Human
gucagcagugucagcucuggggguucugcacaaacacugcuaggguugcugcugau

SEQ ID NO: 4197735 - RNA, 119 nt, Human
gucagcccuguaacccugcauucgucaguaggaaaaugcuuugauggggcuggcuuuuuucuucuagcuauaguacuuggcuuuucuauugagugaauuaagggacacuaaggggugau

SEQ ID NO: 4197736 - RNA, 75 nt, Human
gucagccuaucugugcugauucagcacaggccucucuacgcugcaguccugagcccucagcacagcauggcucac

SEQ ID NO: 4197737 - RNA, 58 nt, Human
gucagccuggugaagccccucaugcuggucacagacugugcccggggcuccaccugau

SEQ ID NO: 4197738 - RNA, 59 nt, Human
gucagcuacugcagggaacuuucagucucacaucgcuaucucuguccuguagagcuggc

SEQ ID NO: 4197739 - RNA, 86 nt, Human
gucagcuaucagaagucuucagacuggagagauuccuggagggggaguggcccuuuaauccaucagcugaagccaucugguaggac

SEQ ID NO: 4197740 - RNA, 77 nt, Human
gucagcuggcccacuccuauuaaccaugccuucaucuguaguggaaggaacauggcucacaggaugggcuagcaggc

SEQ ID NO: 4197741 - RNA, 67 nt, Human
gucagcuuuucuccuuagugucccuguaucccgucuggagcccagaggcaaggaugaagaugccaac

SEQ ID NO: 4197742 - RNA, 60 nt, Human
gucaggaagcaagguugggcauuuguagacaaucaguagcccacccuccaauucuaugac

SEQ ID NO: 4197743 - RNA, 81 nt, Human
gucaggaaggauggcaaaggcagcaccgccuccugaaacaauagagucaucaggcacguugcugcccccgucuaauuugau

SEQ ID NO: 4197744 - RNA, 67 nt, Human
gucaggaaugcucuggaaaaacauccugcauuuggaaggaaauuggaccacaugagcucuuucugac

SEQ ID NO: 4197745 - RNA, 82 nt, Human
gucaggacagcccugcaugcagcaggcggccacuugcaggcccagaagggcuuccugggguccaccugagcagcagccuggc

SEQ ID NO: 4197746 - RNA, 81 nt, Human
gucaggaccaaugaguuccauguguccucaggaaacccugaaggacagcauaugggaaccaguuugauauuuggccuugac

SEQ ID NO: 4197747 - RNA, 60 nt, Human
gucaggagauagggcaagcuucaggaauaguuaagacccagaggguuaucuauccuugac

SEQ ID NO: 4197748 - RNA, 63 nt, Human
gucaggaggcgucucgcuggggcaagagggagcuugcucuuaggcagagggcgucuuugugac

SEQ ID NO: 4197749 - RNA, 79 nt, Human
gucaggcaccuuuggaaacugccucagcucuuccuucuggggguggcaggaggggaaguuuaugguaaagguguaugau

SEQ ID NO: 4197750 - RNA, 58 nt, Human
gucaggcagccuggagauucagggaaaaguuauaguccaacuccaaaugcagucuggc

SEQ ID NO: 4197751 - RNA, 59 nt, Human
gucaggccuggagaaaggaaugacaucuugaugaaacucagcuuucucagaggccuaac

SEQ ID NO: 4197752 - RNA, 126 nt, Human
gucagggagcagcugggcuuggcgccuggaacuuagggucucugagccuccgguguccauggagacugagaggaaauugagacuaucuaugggcucuggggccagggaaggugcucccucagggac

SEQ ID NO: 4197753 - RNA, 58 nt, Human
gucagggcaucucuuaagugguggguaugugccuacagcagagugggaugcaucuggc

SEQ ID NO: 4197754 - RNA, 68 nt, Human
gucaggguugugaaggaaaggggguuaagauugcgguuuaucucauugcuugguuucacaaccuugac

SEQ ID NO: 4197755 - RNA, 68 nt, Human
gucagguuuugcaaaugagcuaaugaauaugcucuuuugcauuucuuuuccuccucuuguuggccugc

SEQ ID NO: 4197756 - RNA, 56 nt, Human
gucaguaaugaauuauaaagcacuaaaaaaauaggcauuuguaaguccuuacugau

SEQ ID NO: 4197757 - RNA, 81 nt, Human
gucaguagugcagaggcugggaaaugcugggacaugcacaagugagccccaugagcacuucuguggccucugcacagagac

SEQ ID NO: 4197758 - RNA, 71 nt, Human
gucaguauugaacuuucaguuaaagcaaccuguuuuucacacaggcagcuuuaacugguaguagaaauggc

SEQ ID NO: 4197759 - RNA, 95 nt, Human
gucagucccucaucuaugcgguugugcaucugggauacuuuauuuuugaugagcauuugguugcagauguggaacucgugccuaugggggagggc

SEQ ID NO: 4197760 - RNA, 75 nt, Human
gucagugcuguggaggcagucagugugguucauaaagcaagcauuguuaaugggccugacucugacagcaguggc

SEQ ID NO: 4197761 - RNA, 58 nt, Human
gucagugggugaaagauggcuaagucugaagcuuguucauguugucguccuaugagac

SEQ ID NO: 4197762 - RNA, 84 nt, Human
gucagugugcaagauggguauuuaugaagcagaauauuuagaguaacugguucagcuuacaaaauacaccuauuaaaauaugac

SEQ ID NO: 4197763 - RNA, 79 nt, Human
gucauagaaacuuggacaugcagcugggugaaauaaguuccauucagcauucauuuccaacuucagccaaucucaugac

SEQ ID NO: 4197764 - RNA, 79 nt, Human
gucauagaguccaguaaaauuugaaacuguccaauuauaucagaaaguucuucauuuuuauuggaaauaaaacuaugac

SEQ ID NO: 4197765 - RNA, 66 nt, Human
gucauagauuucaucugauuugaucccucuuucuucagaugagggcgcuucagagagaugaaugac

SEQ ID NO: 4197766 - RNA, 61 nt, Human
gucagcuguacugugccauagcucacagccacauugugauuugggggagcguauaguuggc

SEQ ID NO: 4197767 - RNA, 100 nt, Human
gucaggacucuguauucuauuuucagggacaagucuuguguaaguccucacugugaaauucaacuugucuuuguaaaauagaaaaccagauuuuuguaac

SEQ ID NO: 4197768 - RNA, 84 nt, Human
gucaggagggucccgagcccugucagaaauuccuccugacaaugaccacaugggcugucucacagggcuaggcccugcccuggc

SEQ ID NO: 4197769 - RNA, 93 nt, Human
gucaggaggucucucagcucucuaaggucuugcuuuuagcucuaacagagaggagguaggggccuuaaagaugcaugggagcccccuuuuggc

SEQ ID NO: 4197770 - RNA, 70 nt, Human
gucaggauguuuauucuccaguucacacccuguagagauaccaccagggguuggcaguguacguccuggc

SEQ ID NO: 4197771 - RNA, 65 nt, Human
gucaggcacuguucuaggugcagagcugcugcuccaaggagcuuacauucugagaggugauagac

SEQ ID NO: 4197772 - RNA, 81 nt, Human
gucaggcaguucuggguucaaaccccggcccccugaguagacaaggcuguggacacugagcucagagagagugugcuugac

SEQ ID NO: 4197773 - RNA, 55 nt, Human
gucaggcuagcccagugcuugggaguuacagcacucaagacacccuggccucuac

SEQ ID NO: 4197774 - RNA, 56 nt, Human
gucagggaaauggagaguguaguuuuauaaaaagucuucacugucuauuucuaggc

SEQ ID NO: 4197775 - RNA, 70 nt, Human
gucagggaggccagggacccagucagcggggcucugcccuugagcagcugacgcccuggcucucuuggac

SEQ ID NO: 4197776 - RNA, 68 nt, Human
gucagggcacagugacagcuccugcucuuccuggggcagugcagauagagcuguaguucugcuuugac

SEQ ID NO: 4197777 - RNA, 89 nt, Human
gucagggcaguguucccuucuggaggcugcagaaaagaaaguguugucuuguuuuuuccagcuucuagaggccgcccacauuccuugac

SEQ ID NO: 4197778 - RNA, 72 nt, Human
gucagggcucaggagaggcaggcgcugcaaugguuaacaaccgggauggggccugccuuccucucucuugac

SEQ ID NO: 4197779 - RNA, 56 nt, Human
gucaggucuuggaagauaggcuucucauacaacccaagccugucuuuugaccugac

SEQ ID NO: 4197780 - RNA, 68 nt, Human
gucagguuggcuugaagugauaucuggaguuugagacuguccagaccccagugcuacagcugccugac

SEQ ID NO: 4197781 - RNA, 79 nt, Human
gucaguaagucuugcuucugcucaaggggaggcaaauuaggcuucaccuuguaaacagagugccaaagaauuuauggac

SEQ ID NO: 4197782 - RNA, 67 nt, Human
gucagucauauuguacagauauguuuuauucuuuccccacacauauuagccuggaucugugacugac

SEQ ID NO: 4197783 - RNA, 105 nt, Human
gucaguccucugggccuugcugaaucccacccuccaguggacugucugugucuagguccaugggggucuugggauauuagaaaagaaucaagaauaaggaaggac

SEQ ID NO: 4197784 - RNA, 67 nt, Human
gucaguggggaggccaggauagaacuagagcuggugucccagguuccagucugggcucuucacugac

SEQ ID NO: 4197785 - RNA, 65 nt, Human
gucaguucacuaccacuccauuuguuuaacuuuagcuaagccaggguagggucagugucacuggc

SEQ ID NO: 4197786 - RNA, 76 nt, Human
gucaguugucaguuugauuugcuccaugaggcuauuguucuucuauaggagccauaaauaaaaucuguugauugac

SEQ ID NO: 4197787 - RNA, 64 nt, Human
gucaguuuccugguuuugauauugugcuacagcuauauaagaugucaccaccggaagaaacugc

SEQ ID NO: 4197788 - RNA, 111 nt, Human
gucaguuuuaagaagugcccucaauuacuaaccaaauaauguauuacaaauaacuaguuaugagguuuuacaguuguuuaauagggaguaauuggccccaauuaaacugac

SEQ ID NO: 4197789 - RNA, 85 nt, Human
gucauaauaagucuucuccuugguuuaugggacauguaggcaaaaaucuacauguguuuucuucuaaagggguuuuauuaaugac

SEQ ID NO: 4197790 - RNA, 75 nt, Human
gucauauuuaggccuuuaauucauuagaaguccaccuuugauugcaguuauagguuuaaauucaguucuaaugac

SEQ ID NO: 4197791 - RNA, 62 nt, Human
gucaucaacauauaggcaaccuguaaguuauuuaccuuaaaguuugccuauguguuguuuac

SEQ ID NO: 4197792 - RNA, 70 nt, Human
gucaucacacauuuacccuuguauaggcaaaccccguguaugcuguucuacaaguguaagcuugugagac

SEQ ID NO: 4197793 - RNA, 55 nt, Human
gucaucagcauuggagauccagcacagaugugcuuuuuguguccaggccgauggc

SEQ ID NO: 4197794 - RNA, 61 nt, Human
gucaucauuaccaggcaguauuagagaccugacuccauccaaugcugcccaguaagauggc

SEQ ID NO: 4197795 - RNA, 67 nt, Human
gucauccacagaaucgcuaguggagcaucugauacgcaggugcuccgugauggacugugacgauggc

SEQ ID NO: 4197796 - RNA, 69 nt, Human
gucauccucccaguauuuacauugugagccuggaugguuagucauugucuuacauacuguggaggaugc

SEQ ID NO: 4197797 - RNA, 73 nt, Human
gucaucuucgauacuucagggggcuaaaucccagcaagaccuugcugaaguucuuccccuaaugaagauagac

SEQ ID NO: 4197798 - RNA, 61 nt, Human
gucaucuuugcccugugcaggacuuuggagaggaugauucccuguacaucaccaaggugac

SEQ ID NO: 4197799 - RNA, 59 nt, Human
gucaugaacaucuacagugagauguuagacuuugucgauaucucaaaaguggaguagac

SEQ ID NO: 4197800 - RNA, 79 nt, Human
gucaugaauuuggcuuuagauuucuagaaccugacccaaagagggaaaucaguucugaaauuuacacugcuuuuaugau

SEQ ID NO: 4197801 - RNA, 106 nt, Human
gucaugaguucaguguuaaucaaucaacaguauuaaauaaggugucuuuaaacagaaaaauacaaaacauggugauguuuugauugauugauaaauauauugugac

SEQ ID NO: 4197802 - RNA, 57 nt, Human
gucaugcacuacauaacgauguuuuggucaaugaccgaccgcguguagugucguggc

SEQ ID NO: 4197803 - RNA, 67 nt, Human
gucaugccaauagugaauuauuagaucuuuuucuuagagcugucagaugauacacuguugucaugac

SEQ ID NO: 4197804 - RNA, 60 nt, Human
gucaugccagcggagcucgggaggccugccgcgccgcaccgagaagcugcugugugugau

SEQ ID NO: 4197805 - RNA, 66 nt, Human
gucauggagaaccuuguaggccacaguacauacaaggcuuuggaggguucuuagcaaaaaagugac

SEQ ID NO: 4197806 - RNA, 72 nt, Human
gucauggagugugcagcaugcucugcuaggagcuguggaaagauucagaagcaggagugugcacaaaaugau

SEQ ID NO: 4197807 - RNA, 62 nt, Human
gucggcgcuggaacgcaguagcuccucuggcggcagcagcacugugagcaccagcacgccgc

SEQ ID NO: 4197808 - RNA, 91 nt, Human
gucggugcaguggauacgcucguggaugcgcagggcggccuugcuggagcaggaguagcugcauuccgagcacuucucaggaugcuccgac

SEQ ID NO: 4197809 - RNA, 68 nt, Human
gucgugcaaucuguguuuguaaagggccuucccaggucuuggcaaguggcagauucuugauacacgac

SEQ ID NO: 4197810 - RNA, 66 nt, Human
gucgugugggucauauuauaaauguucuguucuuaaugaaucuguauguuaguaugacauuaugau

SEQ ID NO: 4197811 - RNA, 113 nt, Human
gucuaaaaauuucugacaauuuaagccaaaagcagcugucugugaauccuucuaagaagaauuuaaacuguuuuugcucaaaauauguccagcauuuauucuauuugagagac

SEQ ID NO: 4197812 - RNA, 59 nt, Human
gucuaaaugcuguguuuuaacauagauaacuuaucuguuguauuacacagauuucagau

SEQ ID NO: 4197813 - RNA, 82 nt, Human
gucuaauagcauaaaauuugcuacuguuaaauaaaugcuuauccccugcauaauuuacagguagaauuuuaaguaauuggau

SEQ ID NO: 4197814 - RNA, 66 nt, Human
gucuaccacaguaugaaaucugaaauccuuacauggaauaacagauuuucaagcuguggguaugac

SEQ ID NO: 4197815 - RNA, 61 nt, Human
gucuaccucucccuaccaagcaccagagccccucugccaucuucuuggggagcagcuagac

SEQ ID NO: 4197816 - RNA, 56 nt, Human
gucuagaaaaugccgagggauguucuccacccuugucuauaaaugcacuucuagau

SEQ ID NO: 4197817 - RNA, 56 nt, Human
gucuagagaggaaggaagugugugaaggugaacaugacuuccugugucccucaggc

SEQ ID NO: 4197818 - RNA, 62 nt, Human
gucuagaugacauauuuuagacuacuguuaucaaauugagugauuuaggauaaagucuggac

SEQ ID NO: 4197819 - RNA, 58 nt, Human
gucuaguuaucuuugauuauaugcauaauauugaugacauauugcaaggaagcuggau

SEQ ID NO: 4197820 - RNA, 56 nt, Human
gucuauaagcaggggaaaacuucauagugucagaagaaacuugucugcuucuaggc

SEQ ID NO: 4197821 - RNA, 79 nt, Human
gucuaugaggcccucuugccacaaugaaauguguaaauauuuguaaauuuacuucagcugccaggauggguaacaugau

SEQ ID NO: 4197822 - RNA, 66 nt, Human
gucuauugugauguugugggguuuguugggggcaugugauaaauaauuuccacauaaucauaagac

SEQ ID NO: 4197823 - RNA, 55 nt, Human
gucuauugugcccugggcugauuauguuccacacagucauucaggaccaguggau

SEQ ID NO: 4197824 - RNA, 94 nt, Human
gucuauuuagugccaggcacugugcuagauccuugggguagagucauaaaacaaucugagauaaggaaacaguacaguguggaauuugauacac

SEQ ID NO: 4197825 - RNA, 73 nt, Human
gucucaaaauuaagcccagguaucuggacagucauguaccccaagaccucugaaguaccugguguucugggac

SEQ ID NO: 4197826 - RNA, 130 nt, Human
gucucaacagccacgggacuugguggccaagccugggaagagcccauugucuucuugcaucaccacuggcuguguggcugcuggcuagcuugcuuguucauuauuuguuuuguggaggcugcccugaguc

SEQ ID NO: 4197827 - RNA, 122 nt, Human
gucucaauauacugcuuucaaggguuguugaaaacuguaugcaaauuuauuagcacagugucuggcccuugcuauaaaugguuucauauuaucacauuucuaugagagcagugaucaaguac

SEQ ID NO: 4197828 - RNA, 59 nt, Human
gucucagauucagacaucuacagguaauuuggaucaguaaagggugcuggauuuaaggc

SEQ ID NO: 4197829 - RNA, 64 nt, Human
gucucaggauguggguuuucacauugugugucucgcacaguaguacacaucuauguccucagau

SEQ ID NO: 4197830 - RNA, 75 nt, Human
gucucaguuuucucaucagucaaauggagacacaauagccuguuucacaacguuguggugagaguuaccugagac

SEQ ID NO: 4197831 - RNA, 56 nt, Human
gucucauagauauucauguaguagagcuuggacugucacagaaauguaagugagac

SEQ ID NO: 4197832 - RNA, 75 nt, Human
gucucauccugcauuucuuucucaugugguacucccagugggaguucugcaugaaaaaggacuacgggauugggc

SEQ ID NO: 4197833 - RNA, 74 nt, Human
gucuccaaccagagguauggcacuauccucucugauagcaaaucaagagcacagugcuggcaucuggugaagac

SEQ ID NO: 4197834 - RNA, 60 nt, Human
gucuccagaauucuugggagggcucugcccacagcuaccccccaccucuucuggccaggc

SEQ ID NO: 4197835 - RNA, 76 nt, Human
gucuccaggcaccaacuggcagucccaggaaguuccuucaucacagggccugccuggcugccgagugugcagcgac

SEQ ID NO: 4197836 - RNA, 78 nt, Human
gucuccaggcuuccacaggcaucacuuugugucucugauaugacucagggcugaaguuauggcugagcuuuuaaugau

SEQ ID NO: 4197837 - RNA, 71 nt, Human
gucuccaucccugggucagcccuuuccugccaugaauucaggaaggcagaggcagcucagcagauggggac

SEQ ID NO: 4197838 - RNA, 76 nt, Human
gucucccaaaauauacuuccccauuaugggggcauuucaaaaucucccuguggguaauguguaacuaaguggggau

SEQ ID NO: 4197839 - RNA, 130 nt, Human
gucucccaacuugagcuguaugaaggcucuuggucucccugggaguugguggaggguggaggcagccugggcuucccuguacacuaacuugagaccagugcaauaaaaguacacaccuuaaaaaaaagac

SEQ ID NO: 4197840 - RNA, 63 nt, Human
gucucccagcugguaagugauggagccaggaguugcauugccuucucacuuauaagcugugac

SEQ ID NO: 4197841 - RNA, 67 nt, Human
gucucccaggcagccccagaagcuugcuccaggccaaaacuuggcaagugcggugcugccuggggau

SEQ ID NO: 4197842 - RNA, 70 nt, Human
gucuccccagggcccucuucauguccguguuccucaggcuguagaugaagggguucagcaugggggugac

SEQ ID NO: 4197843 - RNA, 60 nt, Human
gucucccccgauggaauucuuuggcuugguuauggaagauuucagaguuugggggaagac

SEQ ID NO: 4197844 - RNA, 93 nt, Human
gucucccugccccgagccaauguccuccugccugcgacuggccuaugacagcguaggacccagaggcagaggacguggcauugccauggcgac

SEQ ID NO: 4197845 - RNA, 66 nt, Human
gucuccgcccgccgcccgggcccacggccgcucggcugcggcucggccccgacggccggcggcggc

SEQ ID NO: 4197846 - RNA, 79 nt, Human
gucuccgcugagugacauuugcaccagcugcuuccaaagggaguagcuuuggugaaaugucaccggcuucagcggggau

SEQ ID NO: 4197847 - RNA, 123 nt, Human
gucuccucccccuacuccaccucccugucgggcacauggcggccagcaggugauccucucugcaugcuccauguuccugucucugucugccugccugucuguguagguggcuaguguagagac

SEQ ID NO: 4197848 - RNA, 76 nt, Human
gucuccuccuacauguaagacuagcuuaaaguuauuuaaccucuagacuuuuaguuucuacaugugugaaacagac

SEQ ID NO: 4197849 - RNA, 64 nt, Human
gucuccugaggcauccauugaaguucuauuuuuuaauaaagaguaucaaaggcuuuuaggagac

SEQ ID NO: 4197850 - RNA, 68 nt, Human
gucuccugaugaugguacuggcauuucauaucaaagccaugcuugccagugacugucgcucauuaggc

SEQ ID NO: 4197851 - RNA, 76 nt, Human
gucucuauucacauggaaauuacuauucuagagaaaucaugguaauuuagugauuccaaugugaaguggaagagac

SEQ ID NO: 4197852 - RNA, 57 nt, Human
gucucucaaaacuagaagagaaagguguuuuuuccacaucagucuaguuuugaagac

SEQ ID NO: 4197853 - RNA, 82 nt, Human
gucucuccugcaagguggggaaaggaaaguuaaccugccaguggguucgaagcccuuccugacuuucauacaggagccgggc

SEQ ID NO: 4197854 - RNA, 58 nt, Human
gucucucugacugguccacaccaaaggagaaagaaguuugagacaaggcuggagagac

SEQ ID NO: 4197855 - RNA, 81 nt, Human
gucucucugcucucuggauccuucucuguguauuuugcugcccaaagccccaagagacagcaucuguuuggcuggacagac

SEQ ID NO: 4197856 - RNA, 71 nt, Human
gucucugaaccagggagccaggaacgcaggucggacacaucuuuggcaggcaaguucagcuccaccaggau

SEQ ID NO: 4197857 - RNA, 59 nt, Human
gucucugacaagcugagcgaacagcacuugacaguuggagcacagcugaguucaggguc

SEQ ID NO: 4197858 - RNA, 74 nt, Human
gucucugagacuuagcaucuacauuuuucauaaaauggagacucuauguguagaguguguaaguaucaacugac

SEQ ID NO: 4197859 - RNA, 114 nt, Human
gucucugcugaucugugcacuuaguucaguauuugagguuucggucacgguugugaaaacuacugagacugaaucugaaugauggauuacuucugaugcaugucugccagaggc

SEQ ID NO: 4197860 - RNA, 75 nt, Human
gucucuuccccucaggauagauuguccucucaugcauaugcugaagagucgucuuucuugacauaggccagaggc

SEQ ID NO: 4197861 - RNA, 76 nt, Human
gucucuugacugccaccuggugguccuggaagugaauucacccucuaggagaaccaucagggagguggccagaggc

SEQ ID NO: 4197862 - RNA, 68 nt, Human
gucugaaacaaguuuaagggaucuauguuaaagcugccuaagcauagauauguauacuuguuugaggc

SEQ ID NO: 4197863 - RNA, 83 nt, Human
gucugaaaccacugaugguaccaagucccauacaggugaaguaucccuuaucugaaacguuugggaccagaaguguuucagau

SEQ ID NO: 4197864 - RNA, 60 nt, Human
gucugaaauggaggugggaacuuuuccaauaugaacgauuauucccacugacauucugau

SEQ ID NO: 4197865 - RNA, 61 nt, Human
gucugaagaaucccagggaauuuggccucuuucccagucaggcuccaaagauucuucaugc

SEQ ID NO: 4197866 - RNA, 62 nt, Human
gucugaagcaaucagaguccuuuggccugacaggugggaccuugcccaaggagucugaagac

SEQ ID NO: 4197867 - RNA, 79 nt, Human
gucugaauccaguuuuuccuugcugaggacccggucgaggagcaaugagugggaguagggaggaaaaaucaugucaggc

SEQ ID NO: 4197868 - RNA, 59 nt, Human
gucugacagccagcuguugggucuuccaucguuuuuaaccuucaggugagcacacagau

SEQ ID NO: 4197869 - RNA, 79 nt, Human
gucugacucgauaagcacaggagacgcacagccaggcccuggcuaucuggccucgugaccaugguuuuucagauuagau

SEQ ID NO: 4197870 - RNA, 61 nt, Human
gucugacucuaaagccugucuucuuucuccuaaacauuguggacaggugcuaaagaggggc

SEQ ID NO: 4197871 - RNA, 63 nt, Human
gucugacuuuucaguaggagaaaggaagcugaugaggaauccaguucuccuuugaacagugac

SEQ ID NO: 4197872 - RNA, 56 nt, Human
gucugagacccacucccagagauucugauuucacugggcugaggugugucccgggc

SEQ ID NO: 4197873 - RNA, 57 nt, Human
gucugagcacccuggccugucaucagcgagaguccuguugggucaguguauucagau

SEQ ID NO: 4197874 - RNA, 73 nt, Human
gucugagcgcuggagcuugugugugguuaaaagcauuuuguuuucauguaagccacaggcuuacaguuuagau

SEQ ID NO: 4197875 - RNA, 56 nt, Human
gucugaggaagaugcagggggaauugucugaagcacccccuggcuccuucuaaggc

SEQ ID NO: 4197876 - RNA, 59 nt, Human
gucugagggguuucccaggacacaggacauucaaugcuaaaaccagagaugccucaggc

SEQ ID NO: 4197877 - RNA, 65 nt, Human
gucugaucuuucaagggaagccagcaaaguggauuuuuaugugaagucucuugaauaggucaaac

SEQ ID NO: 4197878 - RNA, 64 nt, Human
gucugauuuaugguagaaaaacugaguccccaggaacuggggaagugacuggcaagaagaggac

SEQ ID NO: 4197879 - RNA, 74 nt, Human
gucugcaagccaaggagaauggccucaggagaaaucacaccugcugcugauaccuugaucuuggacuuccagac

SEQ ID NO: 4197880 - RNA, 82 nt, Human
gucugcaaggcuuggagguggcgccaggggcagcugcugucuucagugcugacuucucccugggguuccuccagccacagac

SEQ ID NO: 4197881 - RNA, 59 nt, Human
gucugcagcuucuugccagagaggcucuaucugauuuucugaugcaagaagcugcaagc

SEQ ID NO: 4197882 - RNA, 72 nt, Human
gucugccagugguuuggcccugaacaccuguuauucaggucacacuugucaggagcuagucuagcuggagac

SEQ ID NO: 4197883 - RNA, 61 nt, Human
gucuggcuagagacacccucccucucuggggagcaaguugggggugucucuguuuccaggc

SEQ ID NO: 4197884 - RNA, 57 nt, Human
gucuggcugugugacaguguuuuuuggucuauuuccagucacacugacaugccacac

SEQ ID NO: 4197885 - RNA, 88 nt, Human
gucuggcuguuuccucacuggauuucgcuuuugaaaaacauuuuucauccacauuuucagucauggauucacugaggagauauuuggc

SEQ ID NO: 4197886 - RNA, 62 nt, Human
gucuggcuuggguagguaguucaaugauucaacaaacacugagcaccuaccuggagccaagc

SEQ ID NO: 4197887 - RNA, 64 nt, Human
gucugggcugugccaaagcucuuccuugugcaucagagcaggagcucacacccacagccagggc

SEQ ID NO: 4197888 - RNA, 98 nt, Human
gucugggggacaggcacagcugacaguucugaccaguggccaccugaaaaucagggccagggccuggggacuguccccucugccuccauccccugggc

SEQ ID NO: 4197889 - RNA, 66 nt, Human
gucuggucccaucaaaugcaauugaagacgugaaaacacaaaguauaacuugauggaaagaccgac

SEQ ID NO: 4197890 - RNA, 91 nt, Human
gucugguguggaagggcauugagaggcugccugccugacacugccuugccugucacgcggguguagcuuucucaauucccauccugccgac

SEQ ID NO: 4197891 - RNA, 102 nt, Human
gucugguuugcauguuuaguuucauuugugggaacugcuuguccaagagugagcucaggucagggcaguuugugccuaugagaauuagcucagcuaucaggc

SEQ ID NO: 4197892 - RNA, 55 nt, Human
gucuguacccacguccugcuaguuuccugcuagcuugugacagugggguggggac

SEQ ID NO: 4197893 - RNA, 71 nt, Human
gucuguaucucuauuacuacaucagccagguuguuaaacugagguugaaauagugauguaugaccccagau

SEQ ID NO: 4197894 - RNA, 85 nt, Human
gucuguauugcuguacuucaaauuucaugaacuguaucaaagcugguaacauaugacaugaacauucagaaauacagcuacagau

SEQ ID NO: 4197895 - RNA, 74 nt, Human
gucugucagugcugcccagggcugaguguccugagccccagauucucgguccgggcagcccccacugacauggc

SEQ ID NO: 4197896 - RNA, 60 nt, Human
gucuguccacuuggaagcucccucuggggcuguguacucaaggagcgucugagggcaggc

SEQ ID NO: 4197897 - RNA, 67 nt, Human
gucugucccugauacugguuaacaggaauauguggcauuuacaguuaucugcagauaagggaaagac

SEQ ID NO: 4197898 - RNA, 58 nt, Human
gucuguccucgcggagacggugaugggccuuucccucucuguacagaugaggacacac

SEQ ID NO: 4197899 - RNA, 56 nt, Human
gucuguccuuuucaucucccaaucaccgacauggugggagauguugagggcagugc

SEQ ID NO: 4197900 - RNA, 58 nt, Human
gucugugccugauuuucaguacuguaugccuuauaguuacagaagauaaggguauuac

SEQ ID NO: 4197901 - RNA, 80 nt, Human
gucugugcuggugauuacaaugaugacaaugaugaaguugaucagagcuaacauuuauugaaacuuacuaugugccagau

SEQ ID NO: 4197902 - RNA, 58 nt, Human
gucuguggcaggggagaaguuugggcaagucacuagaugcuccuuuaccccacaagac

SEQ ID NO: 4197903 - RNA, 79 nt, Human
gucuguguuucauguacuuuuuugauagacagcauuuuuuuguggagcauuuuguuguuagaguaugugaaauguugau

SEQ ID NO: 4197904 - RNA, 88 nt, Human
gucuguuuauucucaucuaaaauggccuuaauccuacuugucccacagggcuuuuuugaaaaagaugaugaugaucauaauaacagac

SEQ ID NO: 4197905 - RNA, 74 nt, Human
gucuguuuggcccuuuuugccccuucugcuuuccucaugaggaugcagcaagaggugccaucuugaaagcagac

SEQ ID NO: 4197906 - RNA, 75 nt, Human
gucuguuuucauagcaucauguuggcaugucaucaguagagaggauagacuugacagggugacuuugugacagau

SEQ ID NO: 4197907 - RNA, 94 nt, Human
gucuuaaaugcuucaugggauaggagaugauccaaugggaacugaauguuuucaauuaggauguuuccauggauacuauuaagcaugccaagau

SEQ ID NO: 4197908 - RNA, 104 nt, Human
gucuuaauggauagaggcagacaucaccaauaaugggaccaggucacuaggggaaauccacugggcuucacucauaauuagguucuguuuugauucccagagau

SEQ ID NO: 4197909 - RNA, 104 nt, Human
gucuuacuuucccaaacuuuuacuuguguauaggugugugugugugcaugcaugcacacaugugugcauucacaugcaugccucugacauauaaaggugaagac

SEQ ID NO: 4197910 - RNA, 70 nt, Human
gucuuauggcaguuuaaguuugaaugcugaaauuaauuuuugacagccccaauaaacugcacauugagac

SEQ ID NO: 4197911 - RNA, 67 nt, Human
ggucauuggcauuccuuccuccuccuccuccugggagugggguggauuucaggcggugucaaaggcu

SEQ ID NO: 4197912 - RNA, 76 nt, Human
ggucauuuagucaugucuuaucaguccucucucugaaaaauacagaugaugauaauugaaaggcacauaaguuucc

SEQ ID NO: 4197913 - RNA, 74 nt, Human
ggucauuugccaauucagcaguuccugcuucagugccuugugacaucaggcaggaugcugucugaagaaugauc

SEQ ID NO: 4197914 - RNA, 65 nt, Human
gguccaaagaguuagaagaugugguuccugcccucagggagcuaaaucacuuauucuuucaugcc

SEQ ID NO: 4197915 - RNA, 72 nt, Human
gguccagacuaagaugggccuaggauucguuuucuaaauggaaaugucugaggcucaucugagguuggcauc

SEQ ID NO: 4197916 - RNA, 57 nt, Human
gguccagcacaacacuggcaugagccaacaggagccacgccggccaccugcugggcc

SEQ ID NO: 4197917 - RNA, 59 nt, Human
gguccauuuccccugaaagcaaccuccugacaugugugaggugggcagguggaguggcc

SEQ ID NO: 4197918 - RNA, 60 nt, Human
ggucccaaacuccugaccucaggugauccacucgccugggccucucaaagugcugggauu

SEQ ID NO: 4197919 - RNA, 69 nt, Human
ggucccacuaaguucuuuucuauguaauaugaucguuuuaaugagggauaggacauggaugagggcacc

SEQ ID NO: 4197920 - RNA, 56 nt, Human
ggucccagcccuggagcccuggucgggguagaggaccaggaguugggggugggacc

SEQ ID NO: 4197921 - RNA, 57 nt, Human
ggucccaggggagcucucugauuggcugugcuugggccagucauuaucuccuggacc

SEQ ID NO: 4197922 - RNA, 72 nt, Human
gguccccuguucagggcgggggcucaaccaguggaucuuuauucuauuagcaauugcccugugcaauagacc

SEQ ID NO: 4197923 - RNA, 82 nt, Human
ggucccggccuugucucauguagaagagaugguuccaggccacauaggccugagcuggucugcugcauggaguggccugacc

SEQ ID NO: 4197924 - RNA, 75 nt, Human
ggucccuaaagagucuuaucuuuuacaaguacauacugaaauauuuacggaugaaaugauaugaugucagggauu

SEQ ID NO: 4197925 - RNA, 56 nt, Human
ggucccuauuguauaaauuagauugaaugagucuuauuuuuauauggauagagacc

SEQ ID NO: 4197926 - RNA, 82 nt, Human
ggucccugaggagauccccccagaaguggugcaggaguauguggacaucauggaggagcugcuggggccuucucucggggcc

SEQ ID NO: 4197927 - RNA, 66 nt, Human
ggucccugcccuccugggacucagagcuucaccuucucaucucugaggccacaguggggugggacc

SEQ ID NO: 4197928 - RNA, 59 nt, Human
ggucccugguucccucugagcuugggaggacuaugugagacagaacaggaccaggggcc

SEQ ID NO: 4197929 - RNA, 56 nt, Human
gguccguggagauuuugugcaggguuauuucaaaucccccacauuaguuccaugcc

SEQ ID NO: 4197930 - RNA, 118 nt, Human
gguccucagacucccuccaggcaugugccugccugugcuguucccucugccaggaaugcuuccuugcagauacacgcaugcauggccagcucucacaccuccuucaagucugcugacc

SEQ ID NO: 4197931 - RNA, 85 nt, Human
gguccucggguuuuucaguugggcaauuacaguaugcuuaggaguagcuucagcuuuuuggauugcccaagucagcccugggauu

SEQ ID NO: 4197932 - RNA, 57 nt, Human
gguccucuccagcgccacagugcccgaccagcaggcgcugggccgcugcgaggggcc

SEQ ID NO: 4197933 - RNA, 60 nt, Human
gguccugccuguucccucugucaccuugcugccauugcaacagcagacaggcuuaggacc

SEQ ID NO: 4197934 - RNA, 73 nt, Human
gguccugggauuuccugagcacucucuggggacaaagcucuauacuuggagagugcaggggaagcccagggcc

SEQ ID NO: 4197935 - RNA, 77 nt, Human
gguccuggguacuggggccuggcuguauuggaggggaacagccagcccuucaguguugccagggccuagcuaggauc

SEQ ID NO: 4197936 - RNA, 56 nt, Human
gguccugguuagcggcuuucagaugucuaccuuugacagcugucuuagcuugggcu

SEQ ID NO: 4197937 - RNA, 61 nt, Human
gguccuguccauuuucgugccuccuuuuaucaguaaagaggacagucaaauggccggugcc

SEQ ID NO: 4197938 - RNA, 79 nt, Human
gguccuuaguaacagaaagucaugcucauuugguggugacucaugucaaauggggaugucauuuucguauaguaggacc

SEQ ID NO: 4197939 - RNA, 55 nt, Human
gguccuucccccgggcucccuuuuuucaugcagaauggagucaggggaaugggcc

SEQ ID NO: 4197940 - RNA, 118 nt, Human
ggucgauaccaccugggccccuccuccagcuugagcccgaaucugcagcauccuggucucccauccuggagggcugcagcgaggcugcugcagagggaagcagaagguucuguugacc

SEQ ID NO: 4197941 - RNA, 63 nt, Human
ggucgccucaggauggaagccuacaggaagggaauuccugagcugacacuuggggagugggcu

SEQ ID NO: 4197942 - RNA, 89 nt, Human
ggucgcucugggggauugguagagcucuguucacucccgggccaggccgggcucauggacagcucuccagccagagaaagaaaccgacc

SEQ ID NO: 4197943 - RNA, 69 nt, Human
ggucgggauguucucaaaaaacgugugcaucgcuggaaaugugagguccugcauguugaggucuuggcc

SEQ ID NO: 4197944 - RNA, 71 nt, Human
ggucuaaugaacacauauuaggugcucaugaccuguuguggaaaugggcacauaguaggugcgcaggagcu

SEQ ID NO: 4197945 - RNA, 90 nt, Human
ggucuacagacucuagcucaagcuacaggaucaagguucuacccacagaagguuggcaucugagcuguguaugguucuaaggcuuagacc

SEQ ID NO: 4197946 - RNA, 75 nt, Human
ggucuaggaugggaucagggcucaggugcggagagacagaguuccuccagguagcuaaguccuggggcuuggacc

SEQ ID NO: 4197947 - RNA, 63 nt, Human
ggucuagguguauguccuaauuugauguguucaaauacaauaauuaagucacacaccuaaacc

SEQ ID NO: 4197948 - RNA, 69 nt, Human
ggucuaguaaugaagaaaugccauaacuucuucauuucaccaagggggcauuuauuucuuuacugcauc

SEQ ID NO: 4197949 - RNA, 64 nt, Human
ggucuagugaauguuugcuguuacuguuuuuuguuagcagcagcagccguagccuuauuacucc

SEQ ID NO: 4197950 - RNA, 58 nt, Human
ggucuauggggccaagaaggucucaugugcauccccauaugggacuagggcccaggcc

SEQ ID NO: 4197951 - RNA, 92 nt, Human
ggucuauuagaaugaacagaucagccuaguacucauuucaaauauguaauugaguaauaauugaucuuggcuuagaauuuuaauuugagacc

SEQ ID NO: 4197952 - RNA, 73 nt, Human
ggucucaaacuugugggcucaagcaauuugccugccuuggccucgcaaagugcugggauuacaagugugagcc

SEQ ID NO: 4197953 - RNA, 62 nt, Human
ggucucaacugaacugauaucaacuaucagaugugugaauagugauaucuuuagaugauucc

SEQ ID NO: 4197954 - RNA, 93 nt, Human
ggucucaccauucccauauccccugacagcaugaccacagggucugguuccaugugacccaucuucacugugggaaaugggugguggguagcc

SEQ ID NO: 4197955 - RNA, 59 nt, Human
ggucucagugaaggagugugcugguccagauucagcugccacugauugccuuugaggcc

SEQ ID NO: 4197956 - RNA, 57 nt, Human
ggucuccauuccuucaucucacuucauggggacugaaugagauccaggggugaggcc

SEQ ID NO: 4197957 - RNA, 71 nt, Human
ggucuccugcucugcugaucagugucucauagggcaaguccugagggaucugggacaacaggugguggacc

SEQ ID NO: 4197958 - RNA, 75 nt, Human
ggucuccuugggaaagcaggaauuaaaggggucaucacuuucagccuucccuuaaucuguuguuuuagggagucc

SEQ ID NO: 4197959 - RNA, 81 nt, Human
gguguuagagugggaggcuggcauguggugaauauuauagagaacauaaaauaguuaauccauuucaguguuccacuugcc

SEQ ID NO: 4197960 - RNA, 58 nt, Human
gguguucugggaugauuguaguguucucugaaaagaguaucauuguuuccagaagacc

SEQ ID NO: 4197961 - RNA, 75 nt, Human
gguguucugucagcuuucauuuauggggaaccugcuaagacccugaaaugacuccagcugaguuacagcaaggcc

SEQ ID NO: 4197962 - RNA, 56 nt, Human
gguguugcaguugaagacugguaaguuugccaaucagaucuuccaacacugacacc

SEQ ID NO: 4197963 - RNA, 63 nt, Human
gguguuguaaauacagcagauaauugaaauuuagauuucagauauaggcacuguuagcagccc

SEQ ID NO: 4197964 - RNA, 89 nt, Human
gguguuuagagcuggagacaaggagaccagcauuugucaagcacuuucuaagccccagacucugugcuccuugcuuucucugcauuacc

SEQ ID NO: 4197965 - RNA, 74 nt, Human
gguguuucuugcgucuguaguguaugguguggguguuagcaaacuccauacaauggcaggcugugaggaagucc

SEQ ID NO: 4197966 - RNA, 67 nt, Human
gguguuugucaggauuggggucaugagucuuuuaguggaagcauucauguccuuccugaacggcacu

SEQ ID NO: 4197967 - RNA, 73 nt, Human
gguguuuuccacaguguggcauaaacuguaagucaaggauguauuaguuaucuauugcuguguaacaaauacc

SEQ ID NO: 4197968 - RNA, 96 nt, Human
gguguuuuucuuagagcccagaaaaugcagaacauagaaucucuagggaaaccagcuucuauggucuguagcugguuacuucuaaaaaaaacuacc

SEQ ID NO: 4197969 - RNA, 85 nt, Human
gguuaaauuugaauugagaucugcaucauaagcucagaaacacugaguguaugcagguuuucaauguuuuucuauuauuuaugcc

SEQ ID NO: 4197970 - RNA, 64 nt, Human
gguuaacaagaauuacucuggaaguaauauuuuuaugucuauccaguaguuauuuuugcaaacu

SEQ ID NO: 4197971 - RNA, 60 nt, Human
gguuaagcuucagaacgcaaugaugccuugcuuuccuggcgucuccacuggggguuaacc

SEQ ID NO: 4197972 - RNA, 72 nt, Human
gguuaauaaguaaaccacagagaagccacaaaggugccuacaugugguuguuguguaguuuaucauuagacc

SEQ ID NO: 4197973 - RNA, 101 nt, Human
gguuaauagaaaagauuuguuccucuguuuauucaauuucuauauaucagagacuugguauuaggaguauaauagcagaggaauaaaaacaugauguugcc

SEQ ID NO: 4197974 - RNA, 76 nt, Human
gguuaauuauagugucuguagaaccuuaacugcuguaagcuuuccagcagacuccacagacguguuauuaguugcc

SEQ ID NO: 4197975 - RNA, 112 nt, Human
gguuaauuucuuuacuauagucauaaaagugggacuucaccuugucagagagaaagccucucugaguaagugacaguucagcugaaaucuaaagguuaaguagguauuaacu

SEQ ID NO: 4197976 - RNA, 61 nt, Human
gguuacagcugaguuuagguacaggaaaaaggauuccucgcgcucucaucaagcuguaacu

SEQ ID NO: 4197977 - RNA, 112 nt, Human
gguuacaggaguaucuuaaaaaggugauugcagauucggcugcucaggauauaguguugcgguuauuagcuuuugacaaugcuaaucucaauugccaggcugcucugugacc

SEQ ID NO: 4197978 - RNA, 56 nt, Human
gguuacagugagaagauagccuacgaggaagugggcccucaucagacacugaaacu

SEQ ID NO: 4197979 - RNA, 75 nt, Human
gguuacccaacuguuauaaaucaacagagaggcacggggagagcauucuguagagcagugacagugcugguaacc

SEQ ID NO: 4197980 - RNA, 55 nt, Human
gguuacuuggugcuuuccccucuggauccaaggcuagauaaguuuccagguaacu

SEQ ID NO: 4197981 - RNA, 68 nt, Human
gguuagacagaguaucuaucaggaguauaacuuccacucugaguaauguccugugaugcuuaaugacc

SEQ ID NO: 4197982 - RNA, 116 nt, Human
gguuagaugggaugggacacucaauacauuuuguuucuuuuucauugcucagagguaaacucaguguccaaaaagaggcaagagaaugcauuaagaauuuccuugccuaaauagcc

SEQ ID NO: 4197983 - RNA, 70 nt, Human
gguuagcuugcugaguuguccuuagggauagcauuuucuguucuuacaaguaugacguagcaggcuggcu

SEQ ID NO: 4197984 - RNA, 78 nt, Human
gguuaggcuuuguguuuugggaacauccagagaacaucuucuaaaggacaaagaugugcugagagcauaaaguuaacc

SEQ ID NO: 4197985 - RNA, 82 nt, Human
gguuagguuugagucccuuuuaaaacugucaguaggagacacccuacggaguauuuacaagaggaaaauaagauuuaucgcc

SEQ ID NO: 4197986 - RNA, 78 nt, Human
gguuagugugguuuuuuagagcaaugcuuggcggucauaaagcaaaugcauuaagucagaacaauagguacauugauc

SEQ ID NO: 4197987 - RNA, 65 nt, Human
gguuaguuagcgaauguguuuugcauucaaccaaggaaguucaaaauacugucucugagagagcc

SEQ ID NO: 4197988 - RNA, 78 nt, Human
gguuauagcagucucuuuugucucaccaguaucaaaaacagagcuggcacagaccaggagaucagaaaauguugagcc

SEQ ID NO: 4197989 - RNA, 74 nt, Human
gguuauauuguccugcagaugguaauauguugcagauacuuaucuucaaauuaccacauuugcuuauguuuacc

SEQ ID NO: 4197990 - RNA, 57 nt, Human
gguuaucaucaccuuuggcaguagcuggaaccaagguuauacuaggucaugauaauc

SEQ ID NO: 4197991 - RNA, 58 nt, Human
gguuaucauuguugacaugauuguuaucaugaugaugauaaugaugacaaugacaacc

SEQ ID NO: 4197992 - RNA, 83 nt, Human
gguuaugaaagagcaggaguguucuagauccacugccggaucccaguggaggcuggcagggaguggagacucccuagaagacc

SEQ ID NO: 4197993 - RNA, 84 nt, Human
gguuaugacguauccuugaaugcuauguuuggacuuuguucagugucaggcaaaggaagguauuugaaaggagaagugaugauu

SEQ ID NO: 4197994 - RNA, 68 nt, Human
gguuaugcaccugcucacacaugugacuguucuuucacaucaccaguuuggguugggaugacaugacc

SEQ ID NO: 4197995 - RNA, 55 nt, Human
gguuaugcaggaugcacgucuucagcugcacugaaucaugccauuuugcuuaauc

SEQ ID NO: 4197996 - RNA, 64 nt, Human
gugaugaaugaugccaguugaaaugccucaugcuucugacucauuucagaaccauuaucaucuc

SEQ ID NO: 4197997 - RNA, 56 nt, Human
gugaugaggcuucuuggugaacauaguucagucugucuugauuauuggccucacac

SEQ ID NO: 4197998 - RNA, 111 nt, Human
gugaugaguauuugauaacacuacaucauccacaacuuagaagaagcauuuuuugguauguuacuucugugauuugguuaggauaugugguuuggacacagugaucauaac

SEQ ID NO: 4197999 - RNA, 57 nt, Human
gugaugauaagucuuuagacagguucauauuguccugucaucugaauuucucaucac

SEQ ID NO: 4198000 - RNA, 85 nt, Human
gugaugcaaucuucaggcaaauaggguguuuuuggggguucugaaagaaagauuuuguuucauuugguuugguagauuguauuau

SEQ ID NO: 4198001 - RNA, 61 nt, Human
gugaugcccagaacccccuggauggaggggagaccccaggcagaggggucuggagcaggac

SEQ ID NO: 4198002 - RNA, 62 nt, Human
gugaugcuaugccugauccuccuuuccauaaacauuagggaagaacuuuuggcaaguguuau

SEQ ID NO: 4198003 - RNA, 98 nt, Human
gugaugcuuccagggugugccugggccuggacaaggccacuaggggacugcccuagccugacucuuugguccuaagguauccaucuguuuagcauuac

SEQ ID NO: 4198004 - RNA, 104 nt, Human
gugauggaggugguggagagacaggccagagguggggcagcccuccgccucaggguuccccauugcucccuggcuagucuccugcuuccuaugaccuuugucac

SEQ ID NO: 4198005 - RNA, 58 nt, Human
gugauggcagugggccucgaguccuuggaccaugagagaccagggccagcugugucau

SEQ ID NO: 4198006 - RNA, 73 nt, Human
gugauggggcuggcuuugaggguuggagaucacacacacacaaucagccagcucuccaaagcaagccccacac

SEQ ID NO: 4198007 - RNA, 70 nt, Human
gugaugguaucgcuggggcaaugucuacaaccaaauuuagaaaguuagaacauucacaggauauuaucau

SEQ ID NO: 4198008 - RNA, 76 nt, Human
gugauguaaaguccuuugaaggcaaaaggagacaugcauaugaucuuccaaaaugcuuucaaguuaguuacgucau

SEQ ID NO: 4198009 - RNA, 55 nt, Human
gugauguagcccuaauucugcagacacuugaauguaguuaguagaaaugcaucau

SEQ ID NO: 4198010 - RNA, 87 nt, Human
gugaugucauccaaauugcuucaugagguaguggcagugggauccauccuuguuugcacaugccagccucagcagcaguggcauuau

SEQ ID NO: 4198011 - RNA, 87 nt, Human
gugaugucugcuuuggaaauauagacucaaggcacauagaugaaauauuuuacugggauuuuaaauuuugaaagcaacaagcauuau

SEQ ID NO: 4198012 - RNA, 77 nt, Human
gugauuaaaucaacaguugcacuggagaggucagcgaggauuaucagagggacccugagugcaacggugaggauuau

SEQ ID NO: 4198013 - RNA, 84 nt, Human
gugauuaacugaucuggaguuagaguagacacugaacuagaaaaagucaucaauguauacucagcauuuagcuuaaguaguugc

SEQ ID NO: 4198014 - RNA, 70 nt, Human
gugauuaccuguggguggguugguuugagagggcuucucagagaaucaggacccacucuacaguuaacac

SEQ ID NO: 4198015 - RNA, 70 nt, Human
gugauuagcuguagugcuuggcauuuaacauacauucaggagauauuugcuggguaaauagcugaguaac

SEQ ID NO: 4198016 - RNA, 57 nt, Human
gugauucaaauguaacuaauuacuuuugagacugaguuuggaaguuauaugagucgc

SEQ ID NO: 4198017 - RNA, 59 nt, Human
gugauuccugggauaugagucuggggguguccucuguacccucagacauauuccaucau

SEQ ID NO: 4198018 - RNA, 82 nt, Human
gugauucgaguaguccagccauaucuuguagcccuucuuugaaugagaggguggcuggaguggucuggugcugggauaucac

SEQ ID NO: 4198019 - RNA, 98 nt, Human
gugauucuccuaccucagccucccgacuagcugggauuacaggcgcccugcgccacguccagcuaauuuucguauuuuuaguagaggugggguuucac

SEQ ID NO: 4198020 - RNA, 61 nt, Human
gugauucugaccuucagggaguuccagaauaaaguuagacuccuacauggccaugagucac

SEQ ID NO: 4198021 - RNA, 59 nt, Human
gugauucuguucuggugcugccccugggcggacccuacccagcacaaggacaggcucac

SEQ ID NO: 4198022 - RNA, 61 nt, Human
gugauugagucacaacaaauccagauuccuggaaucugugagaaaggcuugugcucaucac

SEQ ID NO: 4198023 - RNA, 86 nt, Human
gugauugcuuaaaaaguaacugcugauguauuuguaaauuauuuccaauuuaauuuugugauggcaguuacuuucuaagcuggcau

SEQ ID NO: 4198024 - RNA, 57 nt, Human
gugauugucucucauuccugcaacuccuaauggugcacaucagugagggcagagcac

SEQ ID NO: 4198025 - RNA, 94 nt, Human
gugauuugcauaauuuauucccgucucugggcucugauuggucacaccuugcugacgccggaaccgagacuggagaaaguuugaaugaaagcgc

SEQ ID NO: 4198026 - RNA, 81 nt, Human
gugauuuuagcucagugaaagugguuuugaauuucugcccucugaaaugguaagacaacacauuauguuguuauaagucac

SEQ ID NO: 4198027 - RNA, 82 nt, Human
gugcaaaaauuuguuuucaagucacuggacauaaggcaaugaaauauaaugaucccugagugauugaaaauaaaggaaguac

SEQ ID NO: 4198028 - RNA, 92 nt, Human
gugcaaaaugcuuaggacaguagcuggugcacaguaaacacucaacaucuguuagcuguugugaucauuacuauccucauuaucaucugcau

SEQ ID NO: 4198029 - RNA, 101 nt, Human
gugcaacaaggcugacaugugcugugcugucauguauuuaauuaguugugcauggagauugauacauguggcugucacagcauaauggacuggcauggcac

SEQ ID NO: 4198030 - RNA, 87 nt, Human
gugcaacagugucauuucaauuauuugcucuucuugggcuuaaaccauuaaauagcagaggggcguaaugagggguuuugagugcac

SEQ ID NO: 4198031 - RNA, 87 nt, Human
gugcaacuuaccaagcaacugccuucaauauuuaacggcuuucauaugaaagaggcuagaggaugcaggauuguuuguaaguuguac

SEQ ID NO: 4198032 - RNA, 85 nt, Human
gugcaagaggagauacuugguaggcaaagugugggucaccuggugguuuugaccucgaguucuuucaauucacucauccuugcau

SEQ ID NO: 4198033 - RNA, 66 nt, Human
gucucacagccucuggagguagugugaucucugcgaucucagcugaccccuacagguuguguuagc

SEQ ID NO: 4198034 - RNA, 66 nt, Human
gucucacagugcugaaagcccuucaagucucaauggucuauugaggaggccuuucagggcuugaac

SEQ ID NO: 4198035 - RNA, 56 nt, Human
gucucaccuuaaccaguguuuuuaccuuguaucuaaaugucauugaauggugagac

SEQ ID NO: 4198036 - RNA, 129 nt, Human
gucucacgaguauacaauggaguuuuccagaagggacaagacaugugaugacaucaucacucugaugacuguuggaaugcaugcuuguguacucccauguuuuggacacauccguuuuaauucuaagau

SEQ ID NO: 4198037 - RNA, 62 nt, Human
gucucagacuuucaggguaggccaaccuucaggauuagccuuuucuagaagugucuagggac

SEQ ID NO: 4198038 - RNA, 59 nt, Human
gucucagagagcuacucucuuacagagaauagugugcguagguuguagcucuaagagac

SEQ ID NO: 4198039 - RNA, 128 nt, Human
gucucagccagaaaacuguuggguggguuggcugugacagagcauguagugacagccccugugugggcgaggcugggggcaacuguaacugccacagcccagagccccucagcucucucccuagagau

SEQ ID NO: 4198040 - RNA, 60 nt, Human
gucucagccagaggcugcgaggggcccaacaggccgccaaaggugcuucuggccagagau

SEQ ID NO: 4198041 - RNA, 55 nt, Human
gucucagcgaaaggaguguggcuuucaauaaagagaucacauaauuuccugugac

SEQ ID NO: 4198042 - RNA, 73 nt, Human
gucucagcugaccuaaggucagaagucuagugauguuuagccagacauucuuucaccuuguguccagucugac

SEQ ID NO: 4198043 - RNA, 60 nt, Human
gucucagggacugcuucugggggaacucaaccuaagacagacugcaaaguccuccaagac

SEQ ID NO: 4198044 - RNA, 75 nt, Human
gucucaguuaccaucucuguagucaguaauguugagaugaagcaauguucacuguacuggugaugguuuugagau

SEQ ID NO: 4198045 - RNA, 72 nt, Human
gucucaguuguaucaccugguucugcuuuagccuuauucucaagaagguucuccccagguggugacagagau

SEQ ID NO: 4198046 - RNA, 59 nt, Human
gucucaguuuuccaaacugucaaacucuuuuuuaugacuguugggaagauaacugagac

SEQ ID NO: 4198047 - RNA, 72 nt, Human
gucucauacaagccauggaaaaaucuggugagcuaucucuucucucagaacacccuucuauggugaugggac

SEQ ID NO: 4198048 - RNA, 130 nt, Human
gucucaugguuuugcuguuacuauugucuuuaacuagcuuguacugcaguagagaaggcaauuagcuguguuuaucuuuguugguacacucugaucaaaacagucaaggaacagaugcuuccagguggac

SEQ ID NO: 4198049 - RNA, 80 nt, Human
gucucauugagugcugagcccacuuccuugcacacuccuccguggucccaggaaggauucggcauuucuaaacuggagac

SEQ ID NO: 4198050 - RNA, 56 nt, Human
gucuccagccauucucugaucaucucuguaugaacugaaaugagaaugcugagcac

SEQ ID NO: 4198051 - RNA, 84 nt, Human
gucuccagccuucucagcucagccccuuaucgaaaugcacuaagcaccaucuucaaaggcgcugggcuaaggcaccagggagac

SEQ ID NO: 4198052 - RNA, 73 nt, Human
gucuccccagucccgcaugguccagaaugagauccccuacuucaucuggaccacucggcgggaugugcucgac

SEQ ID NO: 4198053 - RNA, 119 nt, Human
gucucccccugcccagagaacauguucauuuuucuagcuguggaucaagaccaaguucagaggucagagaccuagcaagaaauuggaguguguuccagaucuucaaauagguggggaac

SEQ ID NO: 4198054 - RNA, 55 nt, Human
gugccaugugaucccagaauuaaacagcuaaugaaauucucugcucaaguggcac

SEQ ID NO: 4198055 - RNA, 58 nt, Human
gugccauuucacaggagcugaggguggagacaacagucuguuucuugugaagugacac

SEQ ID NO: 4198056 - RNA, 68 nt, Human
gugcccacaucugcugccuccugggccaguaguuccugguccugggcacaguauaugcccuuguccac

SEQ ID NO: 4198057 - RNA, 56 nt, Human
gugcccacguuggcuccuacagcagcaccgccugcugagaagaggguauguggcgc

SEQ ID NO: 4198058 - RNA, 75 nt, Human
gugcccacuugguaaagcacaauuucaccuucuuguaaaccacagggcagagugaaaugcuaugaaugugggcac

SEQ ID NO: 4198059 - RNA, 62 nt, Human
gugcccaggugucccugagaagucuaucucugcugcuacuuucucagggccgcagaggguac

SEQ ID NO: 4198060 - RNA, 106 nt, Human
gugcccaugucuuccacagagaacagggccuggggacaccaccaugacaucucucugaggguuggucugcaucauggugguucccaaguuuguuuuccaugggcac

SEQ ID NO: 4198061 - RNA, 81 nt, Human
gugccccaugggcuccaggagcccuaagagaguccuuuucacuauugugacuucuugcugggccuggggcaccuggaacac

SEQ ID NO: 4198062 - RNA, 64 nt, Human
gugccccuuucugggaccccugucuccuuccagaaaguacgagacccucccagaagggggcuac

SEQ ID NO: 4198063 - RNA, 74 nt, Human
gugcccugccagugccucccacuggucacauccaacaugaagccagccacaagggaggcuugugcaggcugcac

SEQ ID NO: 4198064 - RNA, 63 nt, Human
gugcccuggcucacagugucucugaaaugguauuauuguagugggauaauugugauuagggac

SEQ ID NO: 4198065 - RNA, 55 nt, Human
gugcccugggaacacagaugccacugaaaaacuuguggucaaguucucagagcau

SEQ ID NO: 4198066 - RNA, 55 nt, Human
gugcccugucucuugucuccagucaucugccugacuuggcugcagugacaggcau

SEQ ID NO: 4198067 - RNA, 99 nt, Human
gugcccuguuucugguuccagauacccuuacacuuccugcacuuuccaaggcacacacacagugggcugcaggggggucuggacuuggagcaggagcac

SEQ ID NO: 4198068 - RNA, 91 nt, Human
gugcccuuucaaggcaacugacagcuggagcccuauggcugguggaggcagacacagggcaggggcucucagcuggccaggaagagggcac

SEQ ID NO: 4198069 - RNA, 68 nt, Human
gugccgacacuggguaaccaacuauucaggcuuuggccacagaagccugguuuugcccagucuugcac

SEQ ID NO: 4198070 - RNA, 59 nt, Human
gugccgcgacgcagucggugcccguguaucccggcaggcgcagagcgaacuugcggcgc

SEQ ID NO: 4198071 - RNA, 77 nt, Human
gugccuacaguuaugaauggagcucuuuguuaccuuccagaucgacaagacagacuguuugguucaugucugugcac

SEQ ID NO: 4198072 - RNA, 70 nt, Human
gugccuacaugugcuggguucuuggccaggcugcagugugucauggugaacaggugggugugguaagcac

SEQ ID NO: 4198073 - RNA, 87 nt, Human
gugccuagcaccagcuggaugcugggaguucagcaugcagagccuuggccucuguccuccggagcucccagucuagcaggcagacac

SEQ ID NO: 4198074 - RNA, 76 nt, Human
gugccucccagccccacaugagcugucucguagggccaagacagcacuuuuguaugggggucuguuucagaggcac

SEQ ID NO: 4198075 - RNA, 89 nt, Human
gugccucugaguccuuggacucaugaucacuucgggguuuccuaaaggcaauuuugugcagugguuaagaccaugggcucuggaggcac

SEQ ID NO: 4198076 - RNA, 90 nt, Human
gugccugaaguauauucauuugacagacauuuacuacauuauuacuacuuuaaaaauacuguucugcaugcugugagggaauacagacac

SEQ ID NO: 4198077 - RNA, 64 nt, Human
gugccugaauucauuuacaacuguugcugcuuuaaacacuucaggcagaauaaguggauggcac

SEQ ID NO: 4198078 - RNA, 61 nt, Human
gugccugcagcaauccauggcacagaccagcuguugguagcugccaggaugcugcacgcac

SEQ ID NO: 4198079 - RNA, 67 nt, Human
gugccugccaucagaaacacucaaagcccucucguuuggguuuugaaauggacucugguggagaugc

SEQ ID NO: 4198080 - RNA, 63 nt, Human
gugccugccucaucaacuugucguguggauuaaacgugauaauccuuguggggcguuuagcac

SEQ ID NO: 4198081 - RNA, 62 nt, Human
gugccugcucagagcccaggguacacccguucuugggagcgggcagggcugugggcaggugc

SEQ ID NO: 4198082 - RNA, 63 nt, Human
gugccugcucugugccacaguugggagcaaaacagacauggccucggggcucagagagugcac

SEQ ID NO: 4198083 - RNA, 65 nt, Human
gugccugggguugagcuaugaagcagaucuuauuguuccuuuuuagcuccccagccccacaguau

SEQ ID NO: 4198084 - RNA, 84 nt, Human
gugccuuacgccgacacucagggcucccucuggcucccaggucacuccuguggccccagagggcgguccgugcggucauggccc

SEQ ID NO: 4198085 - RNA, 71 nt, Human
gugccuuauaguggaugaacuccaaaccaacauauaagaugcuuggucuguguuacaucauuuaaaggugc

SEQ ID NO: 4198086 - RNA, 75 nt, Human
gugccuuccuucuugcuacugcuguugacuccucuauuaguuggagacaagagccuuugggcagaaggaugguac

SEQ ID NO: 4198087 - RNA, 88 nt, Human
gugccuuugaugguaucaaugaauuacuguaaaauaguucuguuaaaagaaaagaacuuccaugugauucuuugaucuaugaaagcau

SEQ ID NO: 4198088 - RNA, 69 nt, Human
gugccuuugugucuaaaacagccaugcuacaaauuagcacugacuugccuuuauuaggcacagggguac

SEQ ID NO: 4198089 - RNA, 91 nt, Human
gugcgcucucagagucccacugagcauaugcagaugaggccugucuguaugcaaaugagcccgucuguaugcagaugaggagagagggcau

SEQ ID NO: 4198090 - RNA, 128 nt, Human
gugcggugagagcagagggggcuccaucccgccccagcuccaggcagcauuaauaaaaugcagguguuuuguguauguauagcugcuugagggaggagggagaaagagccuugacugcagcagcgcau

SEQ ID NO: 4198091 - RNA, 60 nt, Human
gugcgucaucgggcugcagaugggcacccacaaaugcaccagccagucccgcaugaccgc

SEQ ID NO: 4198092 - RNA, 125 nt, Human
gugcgugugcugcuccuuguggugccugaggagagguggccuguguugcauucacagaaaucaugacacacaagacacgagcggccucucuucaguaucagaucccaccugcaugauuccugcac

SEQ ID NO: 4198093 - RNA, 74 nt, Human
gugcuaaaucaugugcagagaucaggagcuaugaggagggagcucugagaaggaagcucuguguacagaagcac

SEQ ID NO: 4198094 - RNA, 58 nt, Human
gugcuagagcugggugguggugacucacuuacaugaggcauuugcuucccaguuucac

SEQ ID NO: 4198095 - RNA, 129 nt, Human
gugcuagcacagggcugacgcugacgggcagucuucuagugcuugagucucuccguaccccugagggaggggugugcucugaccaggaacgagaucagacagcugugagagucccgaccagggcugagc

SEQ ID NO: 4198096 - RNA, 93 nt, Human
gugcuagcaggucucccaauaugcagaugcugccuuguugagucaaagaacauuccaaguagaagcauuugcauucuggggacuagcuucuau

SEQ ID NO: 4198097 - RNA, 67 nt, Human
gugcuauagguccuagguggcaguuucaggucagguaugaccaucuccucugggccuauuuguucac

SEQ ID NO: 4198098 - RNA, 57 nt, Human
gugcucaauuacuguauggauuccacgaguugaugagcgugcugugaccuugagcau

SEQ ID NO: 4198099 - RNA, 64 nt, Human
gugcucacaauuucuucagccacuccaaacuggggccuuggggguccuggggguggcugggcac

SEQ ID NO: 4198100 - RNA, 63 nt, Human
gugcuccagguaggagagagggauccugagucagacaggauccccauccccaucugacugcac

SEQ ID NO: 4198101 - RNA, 57 nt, Human
gugcuccauggccuguguccaucauggggaucauugcccuggcacuuccuggagcac

SEQ ID NO: 4198102 - RNA, 102 nt, Human
gugcuccuggcauccccuccuggagcauuggugaggaaauuauuguacagaaauccgcacugugcucucagugagucugggugugagauaccaucaggagac

SEQ ID NO: 4198103 - RNA, 56 nt, Human
gugcucuauguugauuccuugaugcagugcuuaaggcuuuggucaccauggagcac

SEQ ID NO: 4198104 - RNA, 78 nt, Human
gugcucugaguccuggagaaacgcaggugccugcagcauugagcgcaacgcagguguguuuucaggacuaaugaauac

SEQ ID NO: 4198105 - RNA, 57 nt, Human
gugcucuugggggacucccugggggccaccucgguccucagaaguuuccuggagcau

SEQ ID NO: 4198106 - RNA, 64 nt, Human
gugcucuuggggguguauguuuacuuaaaaugcaaugagucagccuuggcagccccuucaccac

SEQ ID NO: 4198107 - RNA, 71 nt, Human
gucuuaccaaaguguuaugcaaaacucuguuuuguuuacugaaaagaguuuccauugacauuuccuaggau

SEQ ID NO: 4198108 - RNA, 88 nt, Human
gucuuagagccuacccagcaccuaggcugccuuuacuaucucugcaggucagacacagugcugggugcugaguccugucucucaaugc

SEQ ID NO: 4198109 - RNA, 84 nt, Human
gguuauggcaaauggccuuugagaugaaagggaggccgaggccggcaguucauuuagaacaggaguggccaucugucaauagcu

SEQ ID NO: 4198110 - RNA, 117 nt, Human
gguuaugucuuugcacuggucuugguaucagaaacuugaacccagcucaggcuuugcuaauaaagagcuguaagcuuugggcaagucaucuuacuuuccauuguuucagauuuauuc

SEQ ID NO: 4198111 - RNA, 77 nt, Human
gguuauuaguuaagagagcaaaaucuggggauagucugucuuguucaaaucccaucugcauuucuaacuaguugacc

SEQ ID NO: 4198112 - RNA, 105 nt, Human
gguuauuggagcaccuucuguacaccaggggccauucuggaugcugagaauagagccaccaacacagcaaacaaggucccugcugucagggaguucacaguuucc

SEQ ID NO: 4198113 - RNA, 57 nt, Human
gguuauuguuaccuuugugucagauuuguuacuuccuuaacaaaggucugcaagacc

SEQ ID NO: 4198114 - RNA, 82 nt, Human
gguuauuguucuauggugaggcagccacagcgucacucuugagcuuucugcaugccugccucccauaccaaacauuacagcc

SEQ ID NO: 4198115 - RNA, 77 nt, Human
gguucaagaaaggucauugauuuucaguuuguccaacuuuuauuuguuggaaggacuggagugaugacucucaagcu

SEQ ID NO: 4198116 - RNA, 83 nt, Human
gguucaaggcccuguucaaguguuaccucuccugugaagcucccuucccuggggaaggugaccuuucgcugccuucugacucc

SEQ ID NO: 4198117 - RNA, 56 nt, Human
gguucacuccgaucucugccucccucugacgaggcccucugcgauuccaguggacc

SEQ ID NO: 4198118 - RNA, 73 nt, Human
gguucagaauagggcaggugaagaaaagcuauguuuauuuuacccauaguuucaagccuucucuguauugauc

SEQ ID NO: 4198119 - RNA, 75 nt, Human
gguucagaggccugagcaggugagucuagggcagagcacagcagcugucccucaucaccucugggucucugggcc

SEQ ID NO: 4198120 - RNA, 70 nt, Human
gguucagagguaagaggcuugagaauauucuguuauggggaaagcagugaagcuuccaaacugcuggacu

SEQ ID NO: 4198121 - RNA, 129 nt, Human
gguucagaguuugagcucuggggucaggcggagccgaguucagccuuggcacauuccccugcaccagcccgugcccuggggugaaccccugggcucccuuggccucuucucagcuccucacuguguccc

SEQ ID NO: 4198122 - RNA, 60 nt, Human
gguucagcagcauuuaaggauccaagucucuuggauuuggugguuuggauguguguaacc

SEQ ID NO: 4198123 - RNA, 85 nt, Human
gguucaggugugaguuuguuuuagagagaauauggggaggaagauaaaaaagguccuuauucauaagucagacacaccuaguacu

SEQ ID NO: 4198124 - RNA, 72 nt, Human
gguucauauuugaagggagaaagugccauguuuuauauacaucauuuucucuucuuuaaauccagugaaauc

SEQ ID NO: 4198125 - RNA, 79 nt, Human
gguucauccauauugcagcaugugucagaaauuccuguauuuuaaaaggcugaauaauuuucuguuguauggauguacc

SEQ ID NO: 4198126 - RNA, 58 nt, Human
gguucauggaaggcaaaagacacagauggggauauuaauacucuggccuuccugaacu

SEQ ID NO: 4198127 - RNA, 91 nt, Human
gguuccaagcauuucagguagagauauucacccuguagaacgcuuugauucugaagaacauaugauauacaaauccugagauucuggggcu

SEQ ID NO: 4198128 - RNA, 82 nt, Human
gguuccaagucuuugcuauugugaauagugccacaauaaacauaugugugccugugucuuuauagcagaaugauuuauaauc

SEQ ID NO: 4198129 - RNA, 82 nt, Human
gguuccaagucuuugcuauugugaauagugccacaguaaacauaugugugcaugugucuuuauagcagcaugauuuauaauc

SEQ ID NO: 4198130 - RNA, 82 nt, Human
gguuccaagucuuugcuauugugaguagugccacaauaaacauaugugugcaugugucuuuauagcagcaugauuuagaauc

SEQ ID NO: 4198131 - RNA, 59 nt, Human
gguuccagaauuuuguucugcuuguuaaguaauaggcauuccccaaaauuucugcuacu

SEQ ID NO: 4198132 - RNA, 84 nt, Human
gguuccagcagcucaggcugcuucccauugguucucacacagugugcuucucuggguagagcaggcuggggcuucaguugaacc

SEQ ID NO: 4198133 - RNA, 62 nt, Human
gguuccaggaggccucauuuccuguauguuagaagaauaaauaguaaaauguguccuggacc

SEQ ID NO: 4198134 - RNA, 58 nt, Human
gguucccaccacccaggcagagaucaaagaugcaaucuuucaagggacccuggggauc

SEQ ID NO: 4198135 - RNA, 107 nt, Human
gguucccaggugauaugugcuccuggucuuccaugaggaguucaugaggugagcuugaugaggccuaucuuggcagagggaaugguacaugcaaagcucuggaaauc

SEQ ID NO: 4198136 - RNA, 76 nt, Human
gguucccauguuacuaguggagaaacugaggcucagcuacuuggccagggaucgcacagugagaugggcaaggacc

SEQ ID NO: 4198137 - RNA, 61 nt, Human
gguucccggaucuccgagucccacuccaccagcuucuggggcggcaugggguccggggacc

SEQ ID NO: 4198138 - RNA, 58 nt, Human
gguucccucaggcucagguuaggggccaagugcuugcgcuuggcgagcuguggggacc

SEQ ID NO: 4198139 - RNA, 61 nt, Human
gguuccugugccucuagcuggccgggccacaagcauuucuccagcugcuggcccagggacc

SEQ ID NO: 4198140 - RNA, 67 nt, Human
gguuccuguguuacugccuggagcggagcugccuguccugcaacaggcugugacauggaagagaacc

SEQ ID NO: 4198141 - RNA, 83 nt, Human
gguuccuuacugugcuauggagaaauuuguuaccuaaguuuuacccaccaguaauaaguuucuccaaagcacagaaaggaauc

SEQ ID NO: 4198142 - RNA, 62 nt, Human
gguuccuuguuuguagcucugggagccauccugggggcucccucgcuagaaggccgggaacu

SEQ ID NO: 4198143 - RNA, 73 nt, Human
gguuccuuuagguuuuauuuucucaaguguuuauuacauuucacagaaagagaaacuaacaucugaaggugcc

SEQ ID NO: 4198144 - RNA, 86 nt, Human
gguuccuuuuaguggaauccagaguuuaauugcuggaaucuggguaagguuuaguguuucaagacucuuucccuaagacuagagcc

SEQ ID NO: 4198145 - RNA, 101 nt, Human
gguuccuuuuuguuucuuugaaguggaaaaggauuuaaacuauuuuuacgcuccucaguuuaauuguuuucccaacuuuacagaaguuagaaacauacacc

SEQ ID NO: 4198146 - RNA, 64 nt, Human
gguucgggggccccugcggucuccuggauggcagaccagugaggcagcaggagccucugugucc

SEQ ID NO: 4198147 - RNA, 55 nt, Human
gguucuaggucuggggauaaugauguuauccuucauuaucugagaucaugauacc

SEQ ID NO: 4198148 - RNA, 66 nt, Human
gguucuaguuaaaaugcaaauaugcuaccugagacaaguagcagcuaugccauuuugacaugaauc

SEQ ID NO: 4198149 - RNA, 70 nt, Human
gguucuauggcaauugucuaaguuuuaccacuugggagauaauuuagagcuuaguaauuuuuauauggcc

SEQ ID NO: 4198150 - RNA, 65 nt, Human
gguucucagugaauuggaggauggccacccaagugagggaggccauuugcuuuauucacuucacc

SEQ ID NO: 4198151 - RNA, 84 nt, Human
gguucucucaucccuugauuuguuucaaguuagcaucucauuagugaugagugcagaaccaaauagugucaggcagagagaauc

SEQ ID NO: 4198152 - RNA, 120 nt, Human
gguucuuccuuguucaccaguguccgggacauguuggucaaggcuuuuguucgaauagaggaagggagagcaggagcuguguaugcaucauucugaaccacuuuggugagagggagggcc

SEQ ID NO: 4198153 - RNA, 62 nt, Human
gguucuuccuuuacuagccuccacaugaaagaguuaccuaugucucagaggcaggaagagcc

SEQ ID NO: 4198154 - RNA, 82 nt, Human
gguucuugguuucagggaaaacaucccgccuaacccacccagguuaggccccuucccugaagccucccaguccccaagagcc

SEQ ID NO: 4198155 - RNA, 63 nt, Human
gguucuuguuucaagcucugcuuuuggaaaaaccugaagacagagacucugcaacagggaacc

SEQ ID NO: 4198156 - RNA, 56 nt, Human
gguucuuugcuuaaugauucuuuuaagaaagaaaagaaucaguaaguaaggagacc

SEQ ID NO: 4198157 - RNA, 67 nt, Human
gguugaaaaugacuuuauaccaugagaggaccuuucagcuuaaaaaaugguaugaaguugaacaauc

SEQ ID NO: 4198158 - RNA, 97 nt, Human
gguugaacauuguuuaaugguuagauguuaugugugucugcauuuaaaaaaauuguguacauguuauuucacuauugguauuacaauauucauaacc

SEQ ID NO: 4198159 - RNA, 64 nt, Human
gguugaagagaagcauauaugugauguaugaaugaaugaaagcaguguuugcuucaucuuaucc

SEQ ID NO: 4198160 - RNA, 74 nt, Human
gguugaauaaugaggauuggcaaaacucagggaugugcucaccucccuagauuaugaaaucccauugucuaauc

SEQ ID NO: 4198161 - RNA, 68 nt, Human
gguugacagcugugggcucugcauauaugacacacaguggguuauguccaguucuuacugcugugacu

SEQ ID NO: 4198162 - RNA, 69 nt, Human
gguugagagcgcggcucugccagugacuaguguggaauaacagucaccaggguuugcuggguucucacc

SEQ ID NO: 4198163 - RNA, 77 nt, Human
gguugaggaccagguugguguccuucuggccacgcucaguggccagguugcugacgacgaucugguaguucuccauc

SEQ ID NO: 4198164 - RNA, 81 nt, Human
gguugaggcucagcgagguguuguugcuguccuggggucaucaugauccacagugggcacagcaggacucuggcuucagcc

SEQ ID NO: 4198165 - RNA, 77 nt, Human
gguugagggaagguagaggucaccggcacauaguucauuugcaaauauaugcugaugacaucuaucuucccucaacc

SEQ ID NO: 4198166 - RNA, 74 nt, Human
gguugaugcaaaaguaacugugauuuuuggcauugaaaguaagggaaaagaucacaauuacacuugcaccaacc

SEQ ID NO: 4198167 - RNA, 58 nt, Human
gguugauucucauuaucuuggggugccuucugcacuucugucuguaaugggauuuuuc

SEQ ID NO: 4198168 - RNA, 69 nt, Human
gguugauucuugggccuucugaaguucggggcacaugcaggcgagcauuacagauccuaagaauaaauc

SEQ ID NO: 4198169 - RNA, 75 nt, Human
gguugauuugggauagguuuguguuugagaacauauuuguuuauguuuuauuaccaacuuguacuuaaauauacu

SEQ ID NO: 4198170 - RNA, 64 nt, Human
gguugcagucaugugaauaagugugggguuacguugacucgacaaauauuuauugaauguuucc

SEQ ID NO: 4198171 - RNA, 70 nt, Human
gguugccccucuccuugcagauggcugccuaauccuccaggagccauuuuccaagggcgagauggcgagc

SEQ ID NO: 4198172 - RNA, 91 nt, Human
gguugccuaagauagcuguaugaagaaguucugugaaaugauauguacugcuucguugcauagcauuuuuauaaucuucugacuggcaacu

SEQ ID NO: 4198173 - RNA, 83 nt, Human
gguugcuccaaacuugucuaucuaggaaucauguacugcaaagcuaugaagauaccucagaggaucuaagugugggagcuucc

SEQ ID NO: 4198174 - RNA, 68 nt, Human
gguugcugaagccaggccacgcucccugccccagcagguccaggcugagcugaccugguuuggcugcu

SEQ ID NO: 4198175 - RNA, 59 nt, Human
gguugcuuccaccucuuagcuauugugaacaaugcugcuaagaaccuggguacgcaacu

SEQ ID NO: 4198176 - RNA, 61 nt, Human
gguugcuugcagaacagacagacaaccccauggugaguuucucaguucucugcaaggaguc

SEQ ID NO: 4198177 - RNA, 77 nt, Human
gguuggagaucucaucuauggccacuuugugguugcuaauaaagacauggaacuagagaugguguguauugacagcu

SEQ ID NO: 4198178 - RNA, 77 nt, Human
gugcuucccuucaaaacacuaguuuuugagcacuucuacaucagcagcucaaaauguaauguucugaaaccuggcac

SEQ ID NO: 4198179 - RNA, 55 nt, Human
gugcuucuccguucugcagcacuuggcugaggugccagcagggaaugggaaggac

SEQ ID NO: 4198180 - RNA, 130 nt, Human
gugcuugagacuagaggcuuguaauucagguccaucuuguucccauagugaccgaugcugaccucgaaauggaucagcucuuuaaaguugggcaucaugguacaggaaaggaagaugacgcacagcccau

SEQ ID NO: 4198181 - RNA, 56 nt, Human
guaggaacaaaacuggcugacugcagauggugcaaccaguccacuggaguuccuac

SEQ ID NO: 4198182 - RNA, 60 nt, Human
guaggaagcugagcagcauuccuggccuccauccacaagauaccuguagcaguguccugc

SEQ ID NO: 4198183 - RNA, 55 nt, Human
guaggaauuggcuuuggauguguaaaaucacaaauaaccacagcagaguucuuac

SEQ ID NO: 4198184 - RNA, 58 nt, Human
guaggacagcccuugagagcacauuuaucccaauggcuuuugguguguugucagaugc

SEQ ID NO: 4198185 - RNA, 65 nt, Human
guaggacuggauauugaguacugcaauguucaaugacguugcaacucugagguccauacuucuac

SEQ ID NO: 4198186 - RNA, 60 nt, Human
guaggagccauccccaugagagguaagccauggaggcgauaccuggggaaagguaccugc

SEQ ID NO: 4198187 - RNA, 61 nt, Human
guaggaguguucgggaacuggggagcagugcaguuuguuagauccuuccaacuacucuuac

SEQ ID NO: 4198188 - RNA, 78 nt, Human
guaggaguuugaggucuucaugaguugcccgauucaugcucccaugcugguauuuggugaugccuccaaacuauuuac

SEQ ID NO: 4198189 - RNA, 88 nt, Human
guaggauccagugauguuucugcaucagagugaaggaauuucuaaaugagagcaaacucucugccaugcauugacaucgggguucuau

SEQ ID NO: 4198190 - RNA, 67 nt, Human
guaggcacaucuauagggacagcaacaccgagagguaacuguuuuuaaauagaugaguguugccaac

SEQ ID NO: 4198191 - RNA, 57 nt, Human
gugguaugcuuugaagaauuucucuguuguaaaauaucuuccuccacagcgugccac

SEQ ID NO: 4198192 - RNA, 61 nt, Human
guggucacacucucugcaggggcacugggcccagccucugugggaagcugggugugagcgc

SEQ ID NO: 4198193 - RNA, 56 nt, Human
gugguccaaggaguuuccagcacucagcugcagagggaagcuuccuuggugaucac

SEQ ID NO: 4198194 - RNA, 60 nt, Human
guggucguggguguuucccaugugccuuucaugggauccuucuuugaccucacagacggc

SEQ ID NO: 4198195 - RNA, 66 nt, Human
guggucugggucucuuaccaugugacugguaaggcaucagucacaugggauuagaacccauccuau

SEQ ID NO: 4198196 - RNA, 63 nt, Human
guggucugugaaaaggaagcucauuauagguuuuaugugaugagucaccacaguuacagucac

SEQ ID NO: 4198197 - RNA, 83 nt, Human
guggucuucaguugucauacugccuuggugacaaucuuucaauuucaauucaguaaguucagcaauauggauugaagacacac

SEQ ID NO: 4198198 - RNA, 104 nt, Human
guggugaaugggcagucaaguggaugcagagauuguuuuucaacauuacugaaucaugacagagucugccauccuaaaucuuggcuaagauuccuuuacaucac

SEQ ID NO: 4198199 - RNA, 99 nt, Human
guggugaccagcuucagagugggaagcuacucaugcaggcagagggacuuccuuuauuuucauauguguuucucucuuuggaguuuugugggucaaaac

SEQ ID NO: 4198200 - RNA, 57 nt, Human
guggugacccuucaggucucaguacuuuuccaaggagcugggauacaggcuuacugc

SEQ ID NO: 4198201 - RNA, 56 nt, Human
guggugagacgagcuccaugucuuauguaguauucauauauaugugucucaucuac

SEQ ID NO: 4198202 - RNA, 73 nt, Human
guggugauuuauaguaugugcuuucagauucgcccuacuuuaaucaugaaagcuucauucuauagaccaccac

SEQ ID NO: 4198203 - RNA, 56 nt, Human
guggugcaauguguguguguguguguguguguacacacacaagcagguuguggaac

SEQ ID NO: 4198204 - RNA, 70 nt, Human
guggugcuggcaggaauaaauuauggacuuaugaauauaacauaagauucuuuauuaccuggucucaccc

SEQ ID NO: 4198205 - RNA, 60 nt, Human
guggugggacucuucuuuggcagugccaucaucauguacauggcccccaagucccgccau

SEQ ID NO: 4198206 - RNA, 64 nt, Human
gugguggggagagaccggaauguuucccaggaagccacaacccugggggacgcucuccagccac

SEQ ID NO: 4198207 - RNA, 90 nt, Human
guggugggugucaccaauaauaacuugagaauugagaaguacauauucucgcuucacucguuuucaugccuauuuuuggacauccaccau

SEQ ID NO: 4198208 - RNA, 101 nt, Human
guggugguaugcaccuguggucccagcuacucuagaggcugaggcaggaagacugcuugagccugggagauggaggcugcagugagcugugaucacaccac

SEQ ID NO: 4198209 - RNA, 73 nt, Human
gugguggucuauagaaugaagcuuucaugauuaaaguagggcgaaucugaaagcacauacuauaaaucaccac

SEQ ID NO: 4198210 - RNA, 112 nt, Human
gugguggugcuuccaccagucccagccuguguguuuagcucuggggcugguguuaugcaacauguuccaugcuaagacacgcagggggcauucuggggagacacacacacac

SEQ ID NO: 4198211 - RNA, 76 nt, Human
guggugguggcuugaccaggauugaggggcugaagccuucuucgcggccaguccugcucccugaccaccagaccac

SEQ ID NO: 4198212 - RNA, 92 nt, Human
gugguguauuuaauuuggaccaguuuauucauuuuaaguuguuguugaacaaacacacaaaguaggcagugggcuggaaauggggacauugc

SEQ ID NO: 4198213 - RNA, 98 nt, Human
guggugugugagaucgacuucuguuaacuuguaagaguugauggugugcaucuuuuuuuacacuuagcauugagcgaaaucacauugaaaucagccau

SEQ ID NO: 4198214 - RNA, 91 nt, Human
gugguguucacucaaaauucuuuccauuuuguguguguuuaaaauuuuuuuaugcuaauacuuuggaaagaauguaggacauuggaccugc

SEQ ID NO: 4198215 - RNA, 78 nt, Human
gugguuaaugacacaguaauguguuucaucugauaauggauuaggucagaugaauacaguuuugugaguucuaaugau

SEQ ID NO: 4198216 - RNA, 69 nt, Human
gugguuauaccuggguagugcauggaacgcuuaaaaauaaguuucuaccgguacauucagggcaacuac

SEQ ID NO: 4198217 - RNA, 66 nt, Human
gugguuaucagagcuauuuugggaaguggcuuguuuccagccuccuggccuugcuccugaugccac

SEQ ID NO: 4198218 - RNA, 78 nt, Human
gugguucucuuccuccugacugagagcucuagccuucacauccguguuccagucagcaggauggaggaagagaaaugc

SEQ ID NO: 4198219 - RNA, 87 nt, Human
gugguugaagugaguaaccuagacugacauauguguauguaauacguacaugugcacauaaaacaguacuagcuaucuuuucucuau

SEQ ID NO: 4198220 - RNA, 78 nt, Human
gugguugcauuccugccacaggccacuguggcccucuuguuggcggguccaguaguugguggccguggagagcaccau

SEQ ID NO: 4198221 - RNA, 81 nt, Human
gugguuguccaggugcagccagucugccacacgguggcagugcuguuccacacuaggcaggcuugguggcaccgguuccac

SEQ ID NO: 4198222 - RNA, 81 nt, Human
gugguuucucaaaccucuuaauggccuguaaucuuucaacaguuaagaguauugcuaauaagagauuugagaacaauuugc

SEQ ID NO: 4198223 - RNA, 65 nt, Human
gugguuucuccugaguuccacgcuacacaugacagcaaccaacguggugauggucuucagacuac

SEQ ID NO: 4198224 - RNA, 98 nt, Human
gugguuuguaugaugugaagacaugguugagaauaaagugaugguuccccaccugccacccgguuuuccaaugcauaguuaauacaccgacaugccac

SEQ ID NO: 4198225 - RNA, 57 nt, Human
gugguuugugcauagcuccuaucaugacagaaauggguggagcuuaauauguaccac

SEQ ID NO: 4198226 - RNA, 60 nt, Human
gugguuuguuuuauuccuggaaggacuacuucacuguaaagggacaaaacacaaugccac

SEQ ID NO: 4198227 - RNA, 74 nt, Human
gugguuuuccucucuggacaucacauggcugcuuuuucugucauccaaaucucagacauguuguccaugaccac

SEQ ID NO: 4198228 - RNA, 56 nt, Human
gugguuuucuccaacccagaacucugcaagaaguaaagcuugggagagaaagguau

SEQ ID NO: 4198229 - RNA, 83 nt, Human
guguaaaaacuugucacuugcugaaaucaugggaaauaauuuuccuaagauagaagauagugaaaauuaugaguaauuuacac

SEQ ID NO: 4198230 - RNA, 67 nt, Human
guguaaaaauuccagagcuuuguuccucacuggccacaagggagguuaggcacuggauuucuuauau

SEQ ID NO: 4198231 - RNA, 93 nt, Human
guguaaaauaacucuuugagauagugauuuuauuuuguuuggauauauacccaggaugagauugcuguguuguauaggaguucuauuuuucau

SEQ ID NO: 4198232 - RNA, 69 nt, Human
guguaaaguacauacaugaacucauucacuugacaaauauugugagucgugcacuuguauacuuggcac

SEQ ID NO: 4198233 - RNA, 65 nt, Human
guguaaauaauucaacugucuuuagugcaccugucaggaaaaugaggaaggcuugaaguuuacau

SEQ ID NO: 4198234 - RNA, 55 nt, Human
guguaaaucagcuuguguaauaauuguggcacccacgcgcgcaagcagacuuacc

SEQ ID NO: 4198235 - RNA, 58 nt, Human
guguaacuuuuauucaugcucuggguucuccagcagcuuguuaaaaaguuccagacac

SEQ ID NO: 4198236 - RNA, 56 nt, Human
guguaaggccccagguucuuuaccugugaaaugggauuaacgauggcuccuugcgc

SEQ ID NO: 4198237 - RNA, 88 nt, Human
guguacaaaucuggaggcuugaggggagacagaguggacuccggcauuuuccgaguccuacauuucuuccucuggccugggaguacgc

SEQ ID NO: 4198238 - RNA, 83 nt, Human
guguacaccccucugugauaugguuuguaauauccaggggguuagagggugauauugcuccccauaucgcaguggggguacac

SEQ ID NO: 4198239 - RNA, 86 nt, Human
guguacauugauaaaggguugacaguuauuuccaaagcugcaaagugcuauaggaaguaauuguugccuggcuauucagaaggcac

SEQ ID NO: 4198240 - RNA, 59 nt, Human
guguaccuggaaucacagaggcugaguucaaaggucagccucucugaguccagacccgc

SEQ ID NO: 4198241 - RNA, 96 nt, Human
guguaccuuguugcugaaaaaugagugaauugugauuuguggacauauucuacaucauaauaauacuuagaaaguuuauaagcaaaguugguacac

SEQ ID NO: 4198242 - RNA, 109 nt, Human
guguacuaaagaucuuagagaucuuuugugugguaacucuuugcccuuucagcugaugaauaacugaagaugugcaauacaaagaaauuacuaaaagagaacugugcac

SEQ ID NO: 4198243 - RNA, 96 nt, Human
guguacugcagaggcuggacaauuaaaacugugcuucccaaaugcccuugcacugaggguucuggaugugagcguaguucggccauucagauacac

SEQ ID NO: 4198244 - RNA, 86 nt, Human
guguacugcuuuuuuguugcauucauggcauaaauuuuguggacgcauuucuacaaaaaccguggauucagcauguugcagaguac

SEQ ID NO: 4198245 - RNA, 80 nt, Human
guguaggauaguuuuuucugagcaguagaggugaaaugggaucuugucugugucggauaaaacuaagagguccauuacau

SEQ ID NO: 4198246 - RNA, 111 nt, Human
guguagggagugaaaggugaggaagcagcuguuugguuuagugacuuugcagucaugcaaaggcacagaagggaaaccaaacagauuuccuuaaccuuucagucccuagac

SEQ ID NO: 4198247 - RNA, 105 nt, Human
guguagggcauggguguggggucucuggcugcucugggucugcccagcugcccuuggagcuaaagggauaucagagcagcuguuaacccuuucccuguuuuaaac

SEQ ID NO: 4198248 - RNA, 73 nt, Human
guguauaaucucucaugcaaaauuuaguucuuuguuucucagcuuaaacuggauuuugaugagcaguuuucac

SEQ ID NO: 4198249 - RNA, 83 nt, Human
guguauauauguuuauaguaugugcauaugugugcaugugagagcauguacauauacuggcauacaugugcauauuaauauac

SEQ ID NO: 4198250 - RNA, 94 nt, Human
guguaucaauucaauuuuucuuaauccuuuuuauucugugugccaucuagucuucauacagagagcugugauugaguuaauuugauugauaugc

SEQ ID NO: 4198251 - RNA, 58 nt, Human
guguaugcccaucuuuggaagcuggauggaaacagaucccugaggugaggggcaucau

SEQ ID NO: 4198252 - RNA, 101 nt, Human
guguauguaugcauguuauugaugccugaggcuuguggaacucaucugccuggucuauuccuugagagcaacacgcaguaguauacgagcguaacaagaac

SEQ ID NO: 4198253 - RNA, 59 nt, Human
guguaugucugaguaauaaugugugugugggugcaugcaucuaugacuuagacauucau

SEQ ID NO: 4198254 - RNA, 129 nt, Human
guguauguguguguguguguguguguguuugguggggagggcaggggucuugcacgguggcugcccuuguacaccggcccuggcugcaccuuuccccacccucugcuucccaccagccuccucaugcau

SEQ ID NO: 4198255 - RNA, 70 nt, Human
gugucaggcugcuguccacaaagcauccacaagggcaucacccaggagcuuguuggaagcgccggaucgc

SEQ ID NO: 4198256 - RNA, 55 nt, Human
gugucaggggcagccaggaaauguucuguuaagauguccuuucuguuccugagau

SEQ ID NO: 4198257 - RNA, 121 nt, Human
gugucagucaggguucuuuguugcaagcaucagacacugacucuuguuaacuucagcaaaagagagaucugcuggcagaauaucaggaagcucaguuguuugcggagaagccugaagacgc

SEQ ID NO: 4198258 - RNA, 74 nt, Human
gugucagugaaaaauugugauaguguucucugcaaaagaagcagacaguuccuagggcaguauuucacagacac

SEQ ID NO: 4198259 - RNA, 67 nt, Human
gugucauaauuucuguuucaguggucuucugaauguccagagccacuguaaggggaauugccuaugc

SEQ ID NO: 4198260 - RNA, 64 nt, Human
gugucauggcacguuagguguuaauuaggaaucgucuaaagcaaaaaugaacugccaucugcac

SEQ ID NO: 4198261 - RNA, 67 nt, Human
guguccaccguucagcaccagaggcagccguaacuccugccuuugggguaagagagaggugguuagc

SEQ ID NO: 4198262 - RNA, 56 nt, Human
guguccagagaacugugggagcccagaggagggagccccaauucugucuggagcau

SEQ ID NO: 4198263 - RNA, 57 nt, Human
guguccagucauagcccagggcagacauaguuuauccugcacagccuuggcugacac

SEQ ID NO: 4198264 - RNA, 62 nt, Human
guguccauauaagaagacggagagagaccagagccguuucucucucuaccaugugaggacac

SEQ ID NO: 4198265 - RNA, 55 nt, Human
gugucccaggcagucacuaccuauagauuagagcugaugugcuggccuggggcuc

SEQ ID NO: 4198266 - RNA, 64 nt, Human
guguccccucaaaauucauauguugaagccuaaaccccaacaugauaguauuuugaggugaggc

SEQ ID NO: 4198267 - RNA, 74 nt, Human
gugucccgggcucugggaugcaaacagaaucugccuauacucagaauacucacuguaaucccggcgccucacac

SEQ ID NO: 4198268 - RNA, 67 nt, Human
gugucccuggcugccagcauuugggggauggugcuaggacucucccauucagcuugcagucauucau

SEQ ID NO: 4198269 - RNA, 55 nt, Human
guguccuaauuuauagcugggucucauagcagaagccagcucugugguuagauac

SEQ ID NO: 4198270 - RNA, 63 nt, Human
guguccuaccaugaauucacuccaugcuagccacauuggccuguauggcuauuccuuggacac

SEQ ID NO: 4198271 - RNA, 83 nt, Human
guguccucaggguggggcagguuggcacuucccucuggcucuccccggagcagggcuugccgcuuguccuccucucuacucac

SEQ ID NO: 4198272 - RNA, 59 nt, Human
guguccuguucagaagcuugggcagggaagagaugacucgggugaguugagcaggacac

SEQ ID NO: 4198273 - RNA, 64 nt, Human
guguccuuauaagaagagaugccagagaauugaaacgcucucucucuucaccauguaaggacac

SEQ ID NO: 4198274 - RNA, 59 nt, Human
guguccuuauauuguggaaggggcaagggagcucucuggggucucuuuuauagggacac

SEQ ID NO: 4198275 - RNA, 57 nt, Human
guguccuuaucgcgaaagugggacaacacccacuuuauaaaauuggugugaggaagc

SEQ ID NO: 4198276 - RNA, 79 nt, Human
guguccuucucuggcauagcaagcagguccacagcagucccgggaagguuuacacccuucuugcugccggaggagccac

SEQ ID NO: 4198277 - RNA, 89 nt, Human
guguccuugggucagaucuuuggggaugcugugguucugaaaacaaagguacaucccacaguucuccagugggaucugccuguggacac

SEQ ID NO: 4198278 - RNA, 70 nt, Human
guguccuuugugagacagaaggguuauucugcaaauaaggaauaauuucucaauuguuacagguggacau

SEQ ID NO: 4198279 - RNA, 83 nt, Human
gugucgccagccucuggcccuagacugcuucaucacuccccaucuuauauuaugaacagcuuugugcucagauuuguggacac

SEQ ID NO: 4198280 - RNA, 62 nt, Human
gugucggggagagagccugcagggaaggguaaagcccgugggggcagggcucucccagaugc

SEQ ID NO: 4198281 - RNA, 129 nt, Human
gugucgggggccugaacacgaagucgguagaggagcaggucuccaggcacggcuccggcaacaccaacaggaagcgggccaccuuggagagcgcucuuccacugcuggaguuccuggucaauacggcau

SEQ ID NO: 4198282 - RNA, 76 nt, Human
gugucuagcacuuggcagguacccauuggcuguauggauaacaaccauucaguuugggauauuuggagucugacau

SEQ ID NO: 4198283 - RNA, 118 nt, Human
gugucuaucugaaaccacauuuucacccuucgccacuaagugcugaauugugcucuuuacaugugaguaauaauauaguguugcuuaauuuagcaauggcuugugauuucagagacau

SEQ ID NO: 4198284 - RNA, 60 nt, Human
gugucuccaggaucucaggccucucucaagcccaaaaggggcccaggaucucugaggcau

SEQ ID NO: 4198285 - RNA, 62 nt, Human
gugucugagaggauuccugucccgacccugcccggugggcgugcuggcuuccucucugccac

SEQ ID NO: 4198286 - RNA, 59 nt, Human
gugucugccuuuggacuaacuggacugagcuagggauguugguguuagaggacagacau

SEQ ID NO: 4198287 - RNA, 57 nt, Human
gugucuggaacgggugguacucagucaauuauccuaucuagcaucugugacggacac

SEQ ID NO: 4198288 - RNA, 66 nt, Human
gugucuggcuucccucuguucugggccggcuccgaaacgcgcucaagagaaaucggaaucagacac

SEQ ID NO: 4198289 - RNA, 64 nt, Human
gugucugugacucuuaccuacccagccuggguuucccagucuuuuauguaaaagucaaauauac

SEQ ID NO: 4198290 - RNA, 75 nt, Human
gugucuguguguauuucgagcaagaaaaugaauuucugaaaucuggcuuguuuuaagaauacaaacauuagauau

SEQ ID NO: 4198291 - RNA, 81 nt, Human
gugucuguguucacauguguccacccuugaacacauacuuauccuuccauacauguguucaucugugcauacgucgggcac

SEQ ID NO: 4198292 - RNA, 81 nt, Human
gugucuugcacacauucuuuaaaugucuguuaacuaaugaaugaauugacaagaaagcagcauuaagggaacugcagauac

SEQ ID NO: 4198293 - RNA, 60 nt, Human
gugucuuuugcaacuacucaacuccacuguugugguauaaaagcagcuguagauagacac

SEQ ID NO: 4198294 - RNA, 87 nt, Human
gugugaaauugcugggcuaagggaaggcuuuugacauuuccuaguugaguuuuagggaaccuucucaagucuuccuucagauuacac

SEQ ID NO: 4198295 - RNA, 84 nt, Human
gugugaagagcucugacaguaaaucaacagaauaucuguagugagaggcauuggguguuccaugacuuacugugcuuugcacac

SEQ ID NO: 4198296 - RNA, 66 nt, Human
gugugacuuugucaaguugcauagauauugaaauaaccauaauuuuaucacagugacaagguacac

SEQ ID NO: 4198297 - RNA, 69 nt, Human
gugugacuuuucaguaacaagccacaguuguauuucaugugcaauugcccgcacauugagaggugacac

SEQ ID NO: 4198298 - RNA, 76 nt, Human
gugugagacacaugcaagaaacagagacgcugagaaacuucaccaggcucagccaccauguuucuuacaucuccau

SEQ ID NO: 4198299 - RNA, 67 nt, Human
gugugagaggagcagaggaucugggggagggaagggcccaacaccccaagccugugcccucugacuc

SEQ ID NO: 4198300 - RNA, 81 nt, Human
gugugagaucugcaugguauuugcuuuucauggugcccacccaagcaaugauuggcacuagauacacagugggucacaugc

SEQ ID NO: 4198301 - RNA, 74 nt, Human
gugugauucuuaaucugcuucugacaucuuugaaggugaaguccauuucagacagcagggagcaggauucacac

SEQ ID NO: 4198302 - RNA, 77 nt, Human
gugugcacuggcuuucuguuauaaagacauugcuaccaaggcauguuauuaauucuuagaauauugucauuguacau

SEQ ID NO: 4198303 - RNA, 59 nt, Human
gugugcagggggccagcgcagccacugggcaucuggggcagcgcuggucgccuggccac

SEQ ID NO: 4198304 - RNA, 59 nt, Human
gugugcauaugaauguguauacacauguaucgagcauguguaugcacgcacaugcacac

SEQ ID NO: 4198305 - RNA, 72 nt, Human
gugugcaugcacacaugugugagguguguaauauauauauaacuuuauaucugaccaaguuuugcaugccac

SEQ ID NO: 4198306 - RNA, 99 nt, Human
gugugcauguguguuugucuaaauguagcuugaaguguagauguuuccccaaguggcuagacacuacaaucucagaacuauaagaacacagauuuauac

SEQ ID NO: 4198307 - RNA, 63 nt, Human
gugugccaacaaaagacagugccucccaaccuuauuucagggcuucacucguaguugguaugc

SEQ ID NO: 4198308 - RNA, 66 nt, Human
gugugccaagagauaguugcugccaaugccaacggcagcuauuuacugagugucucuccuguauau

SEQ ID NO: 4198309 - RNA, 70 nt, Human
gugugcccaaggacaaggucauuaaguucucuauucaaggcauaguagaggccaccacugucagggacau

SEQ ID NO: 4198310 - RNA, 55 nt, Human
gugugcccuggcuccagcaccaauggguagaagauguuagguggccaggggauau

SEQ ID NO: 4198311 - RNA, 67 nt, Human
gugugcccuggggagcccagccaggcgcucacugcuggggucuggccaggggucccugaagggccau

SEQ ID NO: 4198312 - RNA, 70 nt, Human
gugugccugacaugaugguuaaaaggauuaaacaaaacaauaguuuguaauuuauucugucagagcacac

SEQ ID NO: 4198313 - RNA, 119 nt, Human
gugugccugcucugugccaggcacugucaggugccgggaaugcagcaaugaacaaaauguagaucaauuccugcccucuugggccuuacuaccuggcagaagauauaaaaaagggccac

SEQ ID NO: 4198314 - RNA, 62 nt, Human
gugugcgcgugcacgcauacuugcacacguguguguaugcaagugugugugcaugugcgugu

SEQ ID NO: 4198315 - RNA, 87 nt, Human
gugugcuaguuucaguaggacuugugcuuucauugcaauugucaguaugcuuaagcaggggucucugcuaaugaaauucgagcauau

SEQ ID NO: 4198316 - RNA, 92 nt, Human
gugugcugggaguucuacgugucauaucucuuuuaagccucacaucauuuacagaggaggcacugagaggcuguguugccuccccuggccac

SEQ ID NO: 4198317 - RNA, 55 nt, Human
guguggaaagaguggccucucaaucgaugguucugaggcuauugaauuuccauau

SEQ ID NO: 4198318 - RNA, 75 nt, Human
guguggaagccgggacacuuugcacugugcagcaucuugggcagcauugcaguucccucucaugggcaaucacac

SEQ ID NO: 4198319 - RNA, 77 nt, Human
guguggauagugagguauaaggacagaggugauauuaucucucccuacuucugaaauuucaacuuuacuaauagcac

SEQ ID NO: 4198320 - RNA, 59 nt, Human
guguggcaccuccuuuccagcuccucagggaaugugagacaugugaggagcugccacac

SEQ ID NO: 4198321 - RNA, 88 nt, Human
guguggcaguggcgggugcuguggcagcuccuccucuccucuccugacagaguagugagucagucacccuggaccugcugaccuacac

SEQ ID NO: 4198322 - RNA, 66 nt, Human
guguggcucagcgcggccuggucuuucccgggaauugcgaggaaggccacacuugcuggccagcac

SEQ ID NO: 4198323 - RNA, 64 nt, Human
guguggcucagucuggguugacugauugcuuuccuuguaauuaaaaucuuaauuagagugacac

SEQ ID NO: 4198324 - RNA, 67 nt, Human
guguggcuugcucuaugaaguucuuuggcaauaugcagaacuggaguauucaaaaggcaagcuauau

SEQ ID NO: 4198325 - RNA, 58 nt, Human
guguggcuugggugaggcgccugcaugagggcagggcuaacugacugauaggcuucac

SEQ ID NO: 4198326 - RNA, 62 nt, Human
guguggcuuucuggguuuaauuuuuauugcugcaaauaggaauaagaucuuaaagguuauau

SEQ ID NO: 4198327 - RNA, 55 nt, Human
gugugggauccgaggugaauuaggcaucaugggccuggccuuggggagcucacac

SEQ ID NO: 4198328 - RNA, 79 nt, Human
gugugggcugcggauaggccucggaccuguguaggccuuccuagcuggccaguuucuguccgggucucgcuccccacac

SEQ ID NO: 4198329 - RNA, 89 nt, Human
guguggguguguguaucucgugugugggcugaaugcauguggaucugugcccagguauuuaugagagcacauaugaguguccccaucac

SEQ ID NO: 4198330 - RNA, 65 nt, Human
guguggugacagcugggaggaugacauaaggagcuccuuguggcaccucccagaugucucugcuc

SEQ ID NO: 4198331 - RNA, 77 nt, Human
guguggugaggcccagcauucagggcaggaagaaucguacaagaggugucugucuuugugcugggaucucauugcau

SEQ ID NO: 4198332 - RNA, 66 nt, Human
guucccuugaaaguagagacugagacaagugcuucugugcaguuaagcaguuuaugcuuuggggac

SEQ ID NO: 4198333 - RNA, 70 nt, Human
guuccuaauuugguuucugaugacauucuggcagaauugaauuuuguucuuggaaaucagguccuggaac

SEQ ID NO: 4198334 - RNA, 79 nt, Human
guuccuauuuuucuuauuuugccaugggccaguggaaaacuuaccacuaguucuagguauaguaagaaauuccugugac

SEQ ID NO: 4198335 - RNA, 76 nt, Human
guuccucacagcccuuggcccaggaccccccaagucuccaccuccauggcuccugggaaguggcuggcugaggggc

SEQ ID NO: 4198336 - RNA, 97 nt, Human
guauuuucuauuaaaaauacccauagcuuaguauauuuuguugcaauucaaauagagcaaaguuuugaagauaaauuguacugaagauaggaaaugc

SEQ ID NO: 4198337 - RNA, 75 nt, Human
guauuuucuguccuuuagcaacgaugaugauauuugccaccagcgagugugaucugugaggcgauuuuaaaaugc

SEQ ID NO: 4198338 - RNA, 77 nt, Human
guauuuucuugacauaucuguaagaguaggagagcguacuuucucuuucuuuguaugucuauugaccaaggaaaaac

SEQ ID NO: 4198339 - RNA, 81 nt, Human
guauuuuuaguagagacgggguuucaccguggucucgaucuccugaccaagugauacacccgccucggccucccaaagugc

SEQ ID NO: 4198340 - RNA, 55 nt, Human
guauuuuuaguagagucggggucucaccauguugcccaggcugaauuaaaaauau

SEQ ID NO: 4198341 - RNA, 72 nt, Human
gucaaaagaaauagcaugguucagagugaaauuuucuggaacaggagagagcugagcuuugcuguacuugac

SEQ ID NO: 4198342 - RNA, 76 nt, Human
gucaaaagauggguaaugugccuguguauguguucaucagacccugacgcaccugcccggggacauuccuuuagac

SEQ ID NO: 4198343 - RNA, 78 nt, Human
gucaaaagcuauagucuugccagugaauucagaacuaucacagaagaaacgcuggcauuagggcaguggccuuaugac

SEQ ID NO: 4198344 - RNA, 81 nt, Human
gucaaaaggucaugauaguuuuuaaauuuuguuuugcgcaccuacgcuugauaauuuuagucugaaaauuguaauuuugac

SEQ ID NO: 4198345 - RNA, 67 nt, Human
gucaaacagaauuuacacaucucuaaaauguccuggaaguugauggaggaaguaaaauuugauugac

SEQ ID NO: 4198346 - RNA, 89 nt, Human
gucaaauuaaugaauuuauugucuucguggugccuauuacuaggccagauccuggaguagggcuauaagagaauaagacauuuugugac

SEQ ID NO: 4198347 - RNA, 62 nt, Human
gucaacaacugaaaagcuuuuucuguuaaguagauacauggcagagcauuuuacuuguuggc

SEQ ID NO: 4198348 - RNA, 66 nt, Human
gucaacauggaucaaccuauuuucuugguaaguggauaucaaagaaaauaacuugguuuguuugau

SEQ ID NO: 4198349 - RNA, 60 nt, Human
gucaacuauggauaaagcugcugcaaguauuuguauacaggucuuguccauugugugggc

SEQ ID NO: 4198350 - RNA, 111 nt, Human
gucaacucagggggcauguuugguuuaguaccugccagcguguuguugacaaacaccauauacucucuguugcaaagccaaaacaugaccuuuuccacaaauggaguaagc

SEQ ID NO: 4198351 - RNA, 73 nt, Human
gucaagaacugugaagagucugagaucuugcuccacuugcaagcuaauaaguuagacuuuuacaguuucaugc

SEQ ID NO: 4198352 - RNA, 56 nt, Human
gucaagacuucaccgcucugugcuucccuucuggaagcuggaggguaaguuuagac

SEQ ID NO: 4198353 - RNA, 62 nt, Human
gucaagccuaacuuuaaugggaccaggaaguauacuccucccauggagguggugggaauggc

SEQ ID NO: 4198354 - RNA, 55 nt, Human
gucaagguuugaaaacgccauggcauaucaugccguggacuauucagaccuuagc

SEQ ID NO: 4198355 - RNA, 68 nt, Human
gucaaguggaauucaaaauguaggcaugacaauaaaacagcccuggauucugagguccaacaggugac

SEQ ID NO: 4198356 - RNA, 112 nt, Human
gucaaguuauucuuacgucuagaaauaauaagcuuuugauucacuucagaauauuuugagcugacgucaaggcuuuuaauacaauuuuguugaugcgggagcauaauaugac

SEQ ID NO: 4198357 - RNA, 69 nt, Human
gucaauagcauacccaguaucuggacaagaguacuucucuggaagaugaccuggguaaaacuucaugau

SEQ ID NO: 4198358 - RNA, 60 nt, Human
gucaauaucgccaagugucucuugaacuugcuaacaagaagagaccagaggugaguugac

SEQ ID NO: 4198359 - RNA, 66 nt, Human
gucaauaugguuauaagagccuuucagagcaaaacuuaaaaccucagggcuagguagccauuuggc

SEQ ID NO: 4198360 - RNA, 57 nt, Human
gucaaucagcaagcauuuauugaguguguauguacauacaggcaugcuggaguugac

SEQ ID NO: 4198361 - RNA, 61 nt, Human
gucaaugaguauguucucuccgaaguuuguuagcuuagggaauugggaggaugccacugau

SEQ ID NO: 4198362 - RNA, 115 nt, Human
gucaauuaccuuaguguugugcuuuaauauuuuuuucagauucuuuagccucauagcaaaaacuuuggucuauuaguuugaaaguauugacagaaguagcauuaaggaaguuuuc

SEQ ID NO: 4198363 - RNA, 68 nt, Human
gucaauugcccaucuccuguuugcuuuauggggcgcacccagcugaggaggaaugauggguagaagau

SEQ ID NO: 4198364 - RNA, 83 nt, Human
gucacaagggaguugcugcaugcagguuuggugcagaaaaacaaacaaauacaucaccucuguucagugaauuccuccuugac

SEQ ID NO: 4198365 - RNA, 61 nt, Human
gucacaauauagucugcagagaucuuggcuaucuugacauucuacagacuauaacugugau

SEQ ID NO: 4198366 - RNA, 67 nt, Human
gucacacaguucucuugauuaucuggucccuucaagggguuccacauacaaauggggugcuguugau

SEQ ID NO: 4198367 - RNA, 95 nt, Human
gucacaccugucacuucuguuuaguaccucuuccuaguaaggagaacguaugcucccuuucuggaagggucuacuuagcagaaacgaggaguggc

SEQ ID NO: 4198368 - RNA, 72 nt, Human
gucacacuucccuccagucucaauccagcagcuuuccugaagguaaagcuuccugcaugggacugcugugau

SEQ ID NO: 4198369 - RNA, 80 nt, Human
gucacagaagaagaccaaaggaccugggcagcacagggagcagagugccuguccugggggugguccuugcuuuugugcac

SEQ ID NO: 4198370 - RNA, 64 nt, Human
gucacagacaggucaggaauuugauuguuuaacauuccucagaauuuauggccuucgucuugau

SEQ ID NO: 4198371 - RNA, 60 nt, Human
gucacagacgggacaacgugcagcugccgccaccggccaggcugcugucaccgcugucac

SEQ ID NO: 4198372 - RNA, 56 nt, Human
gucacagaucucuugagucaaggagaugggaacuuaggcucaucuugucugcugac

SEQ ID NO: 4198373 - RNA, 61 nt, Human
gucacaggcaguaacuaggaccucuaacagcugaucacagagcacuuaggcaggccugggc

SEQ ID NO: 4198374 - RNA, 57 nt, Human
gucacaggguccccauauggagaagucuuguuuucacggggguuuaaagcccuggac

SEQ ID NO: 4198375 - RNA, 58 nt, Human
gucacaguaucauguuugaaugacugcauaaauaaagucagaaugaacaugcugugau

SEQ ID NO: 4198376 - RNA, 58 nt, Human
gucacauaaagauuucuugaugagccauacaaccuuauccagguaugaauugugugac

SEQ ID NO: 4198377 - RNA, 70 nt, Human
gucacauggccacaucuagcugcaagggaagcugggaagcguaaucuuguauucagaguggacaugagac

SEQ ID NO: 4198378 - RNA, 79 nt, Human
gucacauguacaggcuuuagccaaucacuguggucagagguaggcuauguuuugauugguuaggucugagucacgugau

SEQ ID NO: 4198379 - RNA, 55 nt, Human
gucacauguugcauuaguguggcauguuugucacaauuaaugaauacauuuugau

SEQ ID NO: 4198380 - RNA, 96 nt, Human
gucaccaacuugucugaguccagugggagcaaauacacucauaugcaacaaguuauaugaagcagauuuauuacucacagauuggcagcaagggac

SEQ ID NO: 4198381 - RNA, 72 nt, Human
gucaccaguaggacauuugguuaagagauaagaggaggaaucauuugucucuccugaugaucugguggagau

SEQ ID NO: 4198382 - RNA, 59 nt, Human
gucaccauggauaagaaucacuggaacagcuuguuaaagcagauucugauucuggaggc

SEQ ID NO: 4198383 - RNA, 57 nt, Human
gucaccauugcccacuccauggccagaaucagggccaagaguggcugaggaggugau

SEQ ID NO: 4198384 - RNA, 119 nt, Human
gucaccuacaagagcuucuacaacuacggaugccaagacucuaucuuuagagaucaaguuucaauuggucuggggauggugucuuuguaucuguauauuuugaaagcuuuucuggugau

SEQ ID NO: 4198385 - RNA, 128 nt, Human
gucaccucaggauggaguugagcuggggccugccuuacacuucuggcagcucuaucauguccccugagaucugcccacagcaaagagguaggaaacgcccugagguucauccauccuguaccagguac

SEQ ID NO: 4198386 - RNA, 66 nt, Human
gucacuagucacccuccaacucuccacuccagccucagccaguagaggaggcgugauucauccgac

SEQ ID NO: 4198387 - RNA, 120 nt, Human
gucacucuggauuauuuuccugacaagccugagaaaagcuuucuuauacaaauuuauucauuuuaguuuguuuuaugagauauuuucugcaugcuuuggauacucaauaguucuuuugac

SEQ ID NO: 4198388 - RNA, 61 nt, Human
gucacuggaauuacaggcaugcaccagcaugcccggcuaauuuuguauuuuuaguagagac

SEQ ID NO: 4198389 - RNA, 59 nt, Human
gucacugguuucaaaggaccgcacaacuuguuaaguugugaaguguucugagacagggc

SEQ ID NO: 4198390 - RNA, 91 nt, Human
gucacuguuaucugcaggaugugcuuuucuuaaggaugaacauauuuugguccacaaguuuccaagacaagcacauuccugccaacaugau

SEQ ID NO: 4198391 - RNA, 56 nt, Human
gucacuguuguuccauugcccuagcaaguaacugggcuugggagcaggcaugugac

SEQ ID NO: 4198392 - RNA, 75 nt, Human
gucacuuaauaauuuguuccacacauauuuacuggauaccuacuagguuuauguuuggugcaggaggaaguagac

SEQ ID NO: 4198393 - RNA, 67 nt, Human
gucacuuaggaacacuuacugguacuauacuuacugcaugcuaagugcuggguuggauccugaggac

SEQ ID NO: 4198394 - RNA, 67 nt, Human
gucacuuaucuggccaccaagagcuugcucaggggacacccugcgacucuuuaagguggccaagggc

SEQ ID NO: 4198395 - RNA, 82 nt, Human
gucacuuauuuuagccagagcauuugcauggaccccaggcccccuggaggcccugugcgacucuagagguucaaauaaugau

SEQ ID NO: 4198396 - RNA, 80 nt, Human
gucacuucaaucugcaagcaauccaggaaggcuaccugaaggaggcagcacuugguccaagcuugaaagauugaguagac

SEQ ID NO: 4198397 - RNA, 57 nt, Human
gucacuucucugauaaucucaguuucccaggacauagcugagaaccaagaggaaggc

SEQ ID NO: 4198398 - RNA, 82 nt, Human
gucacuucuguaggcuucaagaggcuacugaaauaucaauggcagcuuugcaguguucucugagaugcuugaagaggaugau

SEQ ID NO: 4198399 - RNA, 59 nt, Human
gucacuuguccccaguagccuguuuccaacaagaaccaacaggaguggggauuggggau

SEQ ID NO: 4198400 - RNA, 64 nt, Human
gucacuugugccuggcacacagaaggcaaguaagagacuugauuucaguuuuaggcagagugac

SEQ ID NO: 4198401 - RNA, 67 nt, Human
gucacuuuauuaauuuuggugagaaaugcuuguggccugaguuggagugccaguuaauggaagugau

SEQ ID NO: 4198402 - RNA, 96 nt, Human
gucacuuuuaccagguaacacuuguuuggucucauguuuaagccaagucuugcuccuuaaaagagcagcccagcauaugauaagugguagaagggc

SEQ ID NO: 4198403 - RNA, 56 nt, Human
gucagaaaaagcaaggcugggcagggaaauucuucagaccgugcugcagaucugac

SEQ ID NO: 4198404 - RNA, 60 nt, Human
gucagaaaccagucaaacaagaacauccggccaggguccugcuugcugggugguuucugc

SEQ ID NO: 4198405 - RNA, 98 nt, Human
gucagacacgaucccugcucucgaggagcuucuggccacaugggggagguggcagggacccagcucucuguggugggaggcugaguagauaggucagc

SEQ ID NO: 4198406 - RNA, 57 nt, Human
guggcagcaaaauccugcauuccuaugagcaacauaugaauguuucacuugcuccau

SEQ ID NO: 4198407 - RNA, 74 nt, Human
guggcaggaaggggcucacucuggccccaccaaggugagguggggaccaagugauagagcccugauccacccac

SEQ ID NO: 4198408 - RNA, 120 nt, Human
gucaggagcccugggugcaauauuuaaggaggccuucacuucagggcccccgcaaaugcagugcuggugccugggugagggucuccuucaauuuuaugcuagccuggugcuaguucugac

SEQ ID NO: 4198409 - RNA, 57 nt, Human
gucaggcaucaguuuccggguguuuuucauaauggauuucacaggagaugaccugac

SEQ ID NO: 4198410 - RNA, 97 nt, Human
gucaggccuucaguucuaaaguagaaugucuguuucaaaaugcuaacuagaacagccugguggaaaaacauucugugggauuccagaaaggucugau

SEQ ID NO: 4198411 - RNA, 67 nt, Human
gucagggaugagaaagcucucuaaggcucauuuuauuuagugccugcaggguuuuguuauucucugc

SEQ ID NO: 4198412 - RNA, 65 nt, Human
gucagggcacugucaccugauauggaggaugaagccccguguuggguuagggcacugccacugac

SEQ ID NO: 4198413 - RNA, 59 nt, Human
gucagggccaucuuuugccucaagugaugaaugauuugucagguccugauggcccugau

SEQ ID NO: 4198414 - RNA, 74 nt, Human
gucagggccgcuggguucgaugaguggagugugggcgccaccuccuggcugcucauggaaccacagggcuggac

SEQ ID NO: 4198415 - RNA, 92 nt, Human
gucaguacaauguaaaauucaguuccucagccacauuacagguacacaauugccacauguggcuagggaauaaaauauugcacaguguagau

SEQ ID NO: 4198416 - RNA, 76 nt, Human
gucaguagcucaguaaugggcauucaaauucacaugaauucaugugaaauugaaugcccauugcugagcuacuuac

SEQ ID NO: 4198417 - RNA, 72 nt, Human
gucaguagucugggcggcgguggucuccccgcagguggccgcuggcuccucaggacugcgggaucugcugac

SEQ ID NO: 4198418 - RNA, 70 nt, Human
gucagucauugaaugcuggccucuuggaggaaaggugacaacaggugaggccagcaccauaggggcugac

SEQ ID NO: 4198419 - RNA, 55 nt, Human
gucagucuccugccuuuuggacacuauaugcaugcccagguggcagggaauuuac

SEQ ID NO: 4198420 - RNA, 68 nt, Human
gucagucuugcuagagguuugucaauuuuauugaucuuuucaaaaaaucagaucuuugguuaauugau

SEQ ID NO: 4198421 - RNA, 56 nt, Human
gucaguguagguucaucagugguaacaaauguaccacuuugaugguggaugcugac

SEQ ID NO: 4198422 - RNA, 79 nt, Human
gucaguguugcagguaucaacuguacauuauucaaagcacccuaggauucugugauaguugauccuuagaaauaccagc

SEQ ID NO: 4198423 - RNA, 79 nt, Human
gucaguuccacuuaauugcauuaucuauguauugagaaacaucaaucucuagacauggggaaugucaucgugaacugac

SEQ ID NO: 4198424 - RNA, 75 nt, Human
gucaguuccuuguccuuguccuuguuuguccuuccaugaagggacagucacuuccaggagaggacagaauuggac

SEQ ID NO: 4198425 - RNA, 77 nt, Human
gucaguuuaggagagacgcguucuuuaucugagccacacaaccgggcagcuggagcgaggucuugguccuggagugc

SEQ ID NO: 4198426 - RNA, 68 nt, Human
gucaguuuccaggcacuggggcucuuuucuuuggagaaugauacauccaggcugggacuucaacuggc

SEQ ID NO: 4198427 - RNA, 111 nt, Human
gucauaaagaucugcuagcuucagaaauaggcucucaaaugugaccuucauuuaaauguguaaggcaauuucagggcucucuaacauuucugaguuuaagguacuauugac

SEQ ID NO: 4198428 - RNA, 120 nt, Human
gucauagaaaaguccaaaaguagaacuaggacuucagguauagcuugauccaggaguucaagucaugccucccuguccuucaguucaugguuauuuuauucuuggcauugauguuguggc

SEQ ID NO: 4198429 - RNA, 71 nt, Human
gucauagcagcuaccuggcuaagagucucaguucacuugugggacauuuguauuuggugaguggugaugac

SEQ ID NO: 4198430 - RNA, 77 nt, Human
gucauagcaguauuccuuccuaccucccccugaacauuuauucaaauauucuucagagaguagaagcaagcugugau

SEQ ID NO: 4198431 - RNA, 118 nt, Human
gucauagcuuccuuaguuuucugauaaguugcagagguugcaaugugggagauuuucuugcuacuuaagaaauacuuuguaaaucucacaaugauuaagaagucugagaagcucugac

SEQ ID NO: 4198432 - RNA, 60 nt, Human
gucaucaucaggcagaugcugcuccagugcgaggacgaugcaauucgcuaugaugguggc

SEQ ID NO: 4198433 - RNA, 69 nt, Human
gucaucaugucauguuuuccuacaagguaacaauaaugaugcugccucuagaagaugugauaaugugau

SEQ ID NO: 4198434 - RNA, 64 nt, Human
gucauccugcaccaaaguuggcuuggagaaacugccccuccuccagcccuugcugaaggguggc

SEQ ID NO: 4198435 - RNA, 58 nt, Human
gucauccuucuggaacuagucuaagucauccuucuggaacuagucuaaaagggcugac

SEQ ID NO: 4198436 - RNA, 63 nt, Human
gucaucuaguuuguuuccauuuauuguuuuuaauauuaagacagugauguaagcaggagugac

SEQ ID NO: 4198437 - RNA, 63 nt, Human
gucaucugagacuaucuagauuuuaaggaauaccaucaguagaucacauaguuaucagaugac

SEQ ID NO: 4198438 - RNA, 64 nt, Human
gucaugaaauucuagagcuugaagggacuuuaacaaaucuagcccagcccuuugauuuuaugac

SEQ ID NO: 4198439 - RNA, 64 nt, Human
gucaugaagccaugugugcuuuuggcaguaccaccuuugccuccacuuuugcuggcuucuggau

SEQ ID NO: 4198440 - RNA, 72 nt, Human
gucaugagugaguuuggucagaauguuuuuggcugcaaauaacagaaacucaaauuaaacuagcuuaaugau

SEQ ID NO: 4198441 - RNA, 87 nt, Human
gucaugauauaaaccuuggccuguuuuuccuacuagaugauaaaaugcgaacaguaggagccaagcagaacuaaggaaggaugugac

SEQ ID NO: 4198442 - RNA, 77 nt, Human
gucaugcgacugguggccaaguuugaggcagguccuuggcuucucacagacaccuuggccacagucacugcgucugc

SEQ ID NO: 4198443 - RNA, 68 nt, Human
gucaugcugccugggguccuagccuggcccacacucugugucuugcugugugacccuagccaguagac

SEQ ID NO: 4198444 - RNA, 56 nt, Human
gucauggaaggaguggccaaguggaguuucugucugcacagcuugccuuuuaugac

SEQ ID NO: 4198445 - RNA, 96 nt, Human
gucauggaagggagucuggacuuuaucccaagguuaggagggagccguugauggguuuuaaaccggggagugaugugguuuagcuuccuugguggc

SEQ ID NO: 4198446 - RNA, 77 nt, Human
gucauggacagccuguagaccaugccuaccccccggggccuucaucccccauguuggcagggcugcuugucuaggac

SEQ ID NO: 4198447 - RNA, 55 nt, Human
gucauggaggauugugagugguugagaaccacugccauaccccaucucucaugau

SEQ ID NO: 4198448 - RNA, 62 nt, Human
gucauggccaacugaaaugaaagauacauuucucaucuuugcauugaguaguggcaugugac

SEQ ID NO: 4198449 - RNA, 78 nt, Human
gucauggccaguaugaagaagacaaaugacacuccucacgugucuguggagagguccugucuaucacccucgccagau

SEQ ID NO: 4198450 - RNA, 83 nt, Human
gucauggggaauguuagaggaguuuaguuuuguaauuguauaaaaaacagaacauauugcuucucucaagagcaacccaugau

SEQ ID NO: 4198451 - RNA, 77 nt, Human
gucauguaacuaggaaguggcaaaacuggaauuugagaccaaaucucuccgaaagagccuggcuucuagcuacugac

SEQ ID NO: 4198452 - RNA, 69 nt, Human
gucaugugcuggauagaggaggaggugggagggcacacaacuuccaagagccuuucuucuagaugugac

SEQ ID NO: 4198453 - RNA, 77 nt, Human
gucauguuaugcuucucuuugaaaauauccagcagcaauuuauugcuuaaaggauaguuuaaacuccauaacauggc

SEQ ID NO: 4198454 - RNA, 63 nt, Human
gucauuaaauaucaaccuagacuacuaauaauuagaagugguuuuaaaagauguuugagagac

SEQ ID NO: 4198455 - RNA, 64 nt, Human
gucauuaaucaccguggagccaauggcagcucuccaggcccuauucuucaugaugauuaauggc

SEQ ID NO: 4198456 - RNA, 84 nt, Human
gucauuauggacaucaaauaacucuugucacuaacucagauccuacugaggcacuuagagcuauuugucuguccauuaaauggc

SEQ ID NO: 4198457 - RNA, 113 nt, Human
gucauugguacucaccaucauucaauuuucagucacuucuauucuauuaagugccagggucuuguccucagcugaaucuuagaaugcugaugauugugguagauucaguagac

SEQ ID NO: 4198458 - RNA, 66 nt, Human
gucauuuauuugccugggaauucaagaagcagagaaauuagaagaaacuucucaggcacguguggc

SEQ ID NO: 4198459 - RNA, 64 nt, Human
gucauuugaagaagaaacguacuaauaaaaauauauuucuuaaguacuuuagucugcaaguggc

SEQ ID NO: 4198460 - RNA, 73 nt, Human
gucauuugcugccucaguaggugccggcuggaggagcucccaggcuggcacugcugaaguggcauucccugac

SEQ ID NO: 4198461 - RNA, 64 nt, Human
guucucagcagcugggaggcccagccagagcugguagggcagccacccaggcugcuuggagaau

SEQ ID NO: 4198462 - RNA, 64 nt, Human
guucucaguugugcgcaaaaggagagauguaaguauugaugccaguuuaaguagaacugagaau

SEQ ID NO: 4198463 - RNA, 70 nt, Human
guucuccaacuuguuucuuccauucaacagcaugugaaagcaagcuuagaagcaaaaagcaaaggagaac

SEQ ID NO: 4198464 - RNA, 67 nt, Human
guucuccaccacauggcuucuccguguggcuagguugggcucguggagaggccauguggaggacaac

SEQ ID NO: 4198465 - RNA, 70 nt, Human
guucuccaggcgccuccuucuccacucuuucuccagugcuggagaccuaggggugugcauccuggaggau

SEQ ID NO: 4198466 - RNA, 69 nt, Human
guucucccacaacugaucugcuuagggacagugucccuggugcccugggucagccuuuguaaacagaac

SEQ ID NO: 4198467 - RNA, 99 nt, Human
guucucccaucuaauuuucagcuaccuaaaaagcuguuagcccaaaaggugcuggugaggcuguggguaaacgcugaggguacaaugcgagggacggac

SEQ ID NO: 4198468 - RNA, 82 nt, Human
guucucuauuguaucgcagcaucagggacagugccuggcacuuaguagguaggcccugagugcuguuguuugaauggagagc

SEQ ID NO: 4198469 - RNA, 55 nt, Human
guucucucagccuuuguuauuauuaaugcuuaauuuuaaaggaagaagggaggau

SEQ ID NO: 4198470 - RNA, 61 nt, Human
guucucugccugagaacaauuuucugauugcagaacagaaagcuggagucaagcagaguac

SEQ ID NO: 4198471 - RNA, 57 nt, Human
guucugaaugauagucuugaacucuugagcucagaaguuccucuugucaucagaugc

SEQ ID NO: 4198472 - RNA, 89 nt, Human
guucugcauggaaaacuaauggagucaugauggcugcugaugcugaugaaguaguaccagccagccugauuucauaacuuccauagaau

SEQ ID NO: 4198473 - RNA, 100 nt, Human
guucugccguucugccgucagccuugaaggugccgaugugcccugugggccuggccuggguacccuuggcggccuugcugggagucgaccgggugcgagc

SEQ ID NO: 4198474 - RNA, 66 nt, Human
guucugcucuuuuauugaagaagauucugucauucauugacuggagugaguaucgaugaacagaac

SEQ ID NO: 4198475 - RNA, 55 nt, Human
guucugcuuccuugcuugcgcaugcaguaaacagccccaaguuauccagcagaau

SEQ ID NO: 4198476 - RNA, 80 nt, Human
guucuggccccacgcaucugaaguuugucuuaagauauaagccguuuccuaaagaugcuuccacugcaguggcacaggau

SEQ ID NO: 4198477 - RNA, 76 nt, Human
guucuggcuagaaaguuaaacagugauaagaaauuaugaagaaauuucacaucaaaaacaauuuucagagcagggc

SEQ ID NO: 4198478 - RNA, 65 nt, Human
guucugggaagguggaccuguugcuuuacugucaucuccucugccaucaucuuucuucccaggac

SEQ ID NO: 4198479 - RNA, 105 nt, Human
guucugggauucacuugccuuugccguauaguaaaauuuucauuuaugguuuaugcuguuaaauguuccuuuacuggaaugcaagguggugggacccaagagaac

SEQ ID NO: 4198480 - RNA, 65 nt, Human
guucuguaccuucuguuucaagcaaucaugaacauugaugguugagaagguaagguaccaaggac

SEQ ID NO: 4198481 - RNA, 76 nt, Human
guucugugucugucucuuuugguauucucagacuuauguagucauccauauagaaagaugauuaggaaaauaggac

SEQ ID NO: 4198482 - RNA, 68 nt, Human
guucuguucuucaucauuuuagauaggcuauguuuauuucauuuccuguuuauugugaagaacccagc

SEQ ID NO: 4198483 - RNA, 71 nt, Human
gucuauaacuugcuuucccaaggcagaacauagugauuuaacacuaagaguuuaggggagcaggagaggac

SEQ ID NO: 4198484 - RNA, 63 nt, Human
gucuauuugggaucaugauaugggagccaacuuggaggggcucugacagaccacagaugugac

SEQ ID NO: 4198485 - RNA, 58 nt, Human
gucucaaacuccuaggcuaaagugauccucccacuuuggccucccaaaguguugggau

SEQ ID NO: 4198486 - RNA, 60 nt, Human
gucucaaauuuguuagauaaaauuccugacccuuaagaauuuugucuuuaaaauagaggc

SEQ ID NO: 4198487 - RNA, 78 nt, Human
gucucaacacucuuauuuugcuuugcaaaacucuguaagauuauaagggauauuugauagggaaguaagaaugaagac

SEQ ID NO: 4198488 - RNA, 129 nt, Human
gucucacacuugucuuuucaacgaguuguauauuuaugugugaaaauguaugcuauuuguugccaccuaucaaaggaauagacuuuguauaauuucccacauuggacaauuuaaaaguguuugugaagc

SEQ ID NO: 4198489 - RNA, 61 nt, Human
gucucacaguuggcucauuaaugaacauugugugcaaucaauaaguuaccgacugagagac

SEQ ID NO: 4198490 - RNA, 65 nt, Human
gucucacuuggggucucucaugagguuguagucagauggcagucauaugaagacucaaguagggc

SEQ ID NO: 4198491 - RNA, 58 nt, Human
gucucagaaagauucccuuugaaacucacauaaaacaaaauugguuccuuucugaggc

SEQ ID NO: 4198492 - RNA, 91 nt, Human
gucucagagaagaguggaacagcuuuuuuggucagcauuuugaaauaaaaauuguggaccagguagagcuuuuuggcauuccaucugugac

SEQ ID NO: 4198493 - RNA, 79 nt, Human
gucucagcauauugaaugcccagaaggaagaaguuaggcccaacauuaaccccaagccucuuccaagggcugcugagac

SEQ ID NO: 4198494 - RNA, 86 nt, Human
gucucagcuucucacaggaaguaggacuuuucuuuucucagucauccccaaagaaacagaacuguuguucuggaggagucugagau

SEQ ID NO: 4198495 - RNA, 62 nt, Human
gucucagguucgagccuccuuagggcacccccuuuccguccaccuuagccuggaacugagac

SEQ ID NO: 4198496 - RNA, 74 nt, Human
gucucaugacuaagugcauuuuaauugauauugucuggcugcuuggauccaauuagaacuguauuggucuggac

SEQ ID NO: 4198497 - RNA, 76 nt, Human
gucucauuugccucaucuauaaacggaaacaaugcugguacugaccucauaguauuuuguagggcuuaaaugagau

SEQ ID NO: 4198498 - RNA, 90 nt, Human
gucuccauguggcuggcuccagaguccucccugauaagagaaacaaaccguucugcagacacuggggucuggaggcuccacgugguagac

SEQ ID NO: 4198499 - RNA, 72 nt, Human
gucucccuggcccaauaguggggauauaccugaguugagcuagaggauuuuaucccuguugggaugggggac

SEQ ID NO: 4198500 - RNA, 57 nt, Human
gucuccucaaguuccguggcagacuaguaagacugaguuugacaccuugggagagac

SEQ ID NO: 4198501 - RNA, 59 nt, Human
gucuccuccaguccuccaaggacaaauugaggaguuauuugcucuggggguggagagac

SEQ ID NO: 4198502 - RNA, 72 nt, Human
gucuccugaggcucgcgcgccccuggugggcgugagaggaggcguccccgcggcgguccggccucaggaagc

SEQ ID NO: 4198503 - RNA, 69 nt, Human
gucucgcccgcccugccucucgggcucugcccagcuuccugaguccugacagagcacagugggggagau

SEQ ID NO: 4198504 - RNA, 101 nt, Human
gucucuagaagccaagaguggucacugggaucagcuggaaaacagcucaguccuggagcugcaaggcugaauucagcugagaacucaaugacccuggaggc

SEQ ID NO: 4198505 - RNA, 66 nt, Human
gucucucaggaaugcaucaggcauaaaaaggaaccaaaaguauugccugcuguguuauuguagaac

SEQ ID NO: 4198506 - RNA, 65 nt, Human
gucucuccagccaggggcuuccugaaagagcugccuucugagcaggccccccaggcuaggaagau

SEQ ID NO: 4198507 - RNA, 96 nt, Human
gucucucuacccagcgaccuccugccugagagucuguuggucaauuuagcuguaaccagggucaaaugggcaggaagagucaugugggggagagau

SEQ ID NO: 4198508 - RNA, 63 nt, Human
gucucucugcagcaucuauguucuccagcagugaggacuauuuauaaugcugcagaaaugggc

SEQ ID NO: 4198509 - RNA, 60 nt, Human
gucucugaagucaguuuuucuagucauuucuugagaggcagugagugugacuucacagac

SEQ ID NO: 4198510 - RNA, 58 nt, Human
gucucugccauuccauuaggacucagugucacccaggagccuagagggaaggcaggac

SEQ ID NO: 4198511 - RNA, 57 nt, Human
gucucuggaaauuucaguuuuagagggugauuuucuucuuccugguuuuucaagaac

SEQ ID NO: 4198512 - RNA, 61 nt, Human
gucucuggcagaagccccguggaaccucagccggacaggaggugacgcuucuccagaugac

SEQ ID NO: 4198513 - RNA, 59 nt, Human
gucucugggaaauagaggacccuagagccauauuggaucaggccugauaucccagacac

SEQ ID NO: 4198514 - RNA, 58 nt, Human
gucucugggugugugaugccaaaccuugccaaggggggcacuguguacacacagagac

SEQ ID NO: 4198515 - RNA, 63 nt, Human
gucucugugugugauugugggucugugugucugugugugugcggaaggggucauaauggagac

SEQ ID NO: 4198516 - RNA, 71 nt, Human
gucucuucauauuaugauuugaaaugccuuucacauuaaggcauguguuauuuuauguaugaaaaugaggc

SEQ ID NO: 4198517 - RNA, 122 nt, Human
gucucuucaucuugcucagcuucaguuuccucauccauaaaauuguaucaucaugucuuacaaauaugauuucaguaaugaggaugaaggagaucaggcaccuauggcgucauggagaagac

SEQ ID NO: 4198518 - RNA, 83 nt, Human
gucucuuggaauaaacugcaagauccagguaggguaaaucuaugguuacucaccacacccuugcacuugaaauuuaagaugau

SEQ ID NO: 4198519 - RNA, 88 nt, Human
gucucuuugcuguauuggugaugacuugaggccagaguuugcaaaacagaaaaugcucauauguauuuccaaugccaaggaaggagau

SEQ ID NO: 4198520 - RNA, 73 nt, Human
gucucuuuuggguccagauggugagaguuaaggcuauuauguguauuaaaacaccaucuguauuuuugagaac

SEQ ID NO: 4198521 - RNA, 59 nt, Human
gucugaaaaugcccuacgauugccuuuacaaauaacugguacuucggcaggguuuagau

SEQ ID NO: 4198522 - RNA, 78 nt, Human
gucugaaagccaggaggagggcgcucgccagaaccgaauuugccagcaccuugaucuuggaguucccugcuuucagac

SEQ ID NO: 4198523 - RNA, 83 nt, Human
gucugaagaggccacaaaggcuuuuguuccuauuuagucucuucgaaacuaggugccacaaaggcuuuuguuccuauuuaguc

SEQ ID NO: 4198524 - RNA, 68 nt, Human
gucugaauacguacuugugaaggcguguaaaccggcccuuuaugcuuuuacagccccuuguuucagac

SEQ ID NO: 4198525 - RNA, 62 nt, Human
gucugacacagugauuaguaaauuaauucaacaaauuauugagcaucuacuguguuccagac

SEQ ID NO: 4198526 - RNA, 90 nt, Human
gucugacagcaucuauuccuggccauccugugaccugagaggccccagugccuccucuagacaguagcaugcaccaggaggguaugugac

SEQ ID NO: 4198527 - RNA, 64 nt, Human
gucugacaugagggcuguggagaccuugauucauuuguccaaucucggcagcccugugacagac

SEQ ID NO: 4198528 - RNA, 86 nt, Human
gucugacuugguggguggguuguugcaguugaagucuccaggaaaugcucauggacaggugcacacagcagccaaggggucagggc

SEQ ID NO: 4198529 - RNA, 60 nt, Human
gucugagaggcagaccuuccuaagagacgauaauuuuacagaagugaaggccuuuaagau

SEQ ID NO: 4198530 - RNA, 75 nt, Human
gucugaggcagcuguuccugguuggugggaagcuuucuuccauacagugacucaggaauccaagcuccuuuugac

SEQ ID NO: 4198531 - RNA, 57 nt, Human
gucugagggagaaggaucugggcugggacucccagguccuuucuguacccuccggac

SEQ ID NO: 4198532 - RNA, 121 nt, Human
gucugauagucaaggggcugguuacuauuagguuggugcaaaaguaaaugugguuuuuagaaauaauggcaaaaccccuaauuacuuuugcaccaaccuaauaauucacccacagucagac

SEQ ID NO: 4198533 - RNA, 58 nt, Human
gucugauuuggcugcuucaacagcucaggccagagcuagugacagcaugaauuaggac

SEQ ID NO: 4198534 - RNA, 91 nt, Human
gucugcacuugggggcaggcgcccaaaauucauguccauggcuguuuuuaugccaugcugagacuggagcagcuggcuuccccgugcaggc

SEQ ID NO: 4198535 - RNA, 68 nt, Human
gucugcauucuggauagcuagucaaugcucgaacauuaugguugccuaguaaauccugaauagcaggc

SEQ ID NO: 4198536 - RNA, 63 nt, Human
gucugccauguggagaaagccauacugcaguaugagugauaaagcugccacacagguacagac

SEQ ID NO: 4198537 - RNA, 91 nt, Human
gucugcuacauuuucuugucucaucuuuccucaaaagauccaaguuugggaaaagacugguugugaucagguggaagguggaguagcugac

SEQ ID NO: 4198538 - RNA, 82 nt, Human
gucugcucccugaauuuggugccugggaaaucucuggagacuuuagggagaacaguugcagcagacaaggggccaggaggac

SEQ ID NO: 4198539 - RNA, 74 nt, Human
gucugcuccuccucccagcugggacccagccagcucaguggcaucgcagcagcugggaagacuggaagacagac

SEQ ID NO: 4198540 - RNA, 59 nt, Human
gucugcuguguucagagcugugaccuuugugccuacauagcgccugcaacaaggcagau

SEQ ID NO: 4198541 - RNA, 57 nt, Human
gucugcuuuucugaauugccuguucauagauagguauaggcauaagguuagguagau

SEQ ID NO: 4198542 - RNA, 59 nt, Human
gucugcuuuucugcccuuucaugauucaagucaugaaaccuaaugcgaaaaggcaagau

SEQ ID NO: 4198543 - RNA, 78 nt, Human
gucugcuuuugagucucugccaaaacacaagugacaguggcuaacuuccuugcguugguaagcucagaauaaauagac

SEQ ID NO: 4198544 - RNA, 69 nt, Human
gucugcuuuuuagggauuaguguuugaggagguuugcagcugcucagcacauuccuaagggaugcagac

SEQ ID NO: 4198545 - RNA, 61 nt, Human
gucuggaaauucaauuuaaugcuaugauuauagucagaaugcuuuauuugaaauugcagac

SEQ ID NO: 4198546 - RNA, 63 nt, Human
gucuggaagagcaggaauaaacuugucugggcaaguaauaacuucuuccucuuauccauggac

SEQ ID NO: 4198547 - RNA, 65 nt, Human
gucuggaagcaggccaguaugagacaggaguccccagggacucuguagggacgguucucccagac

SEQ ID NO: 4198548 - RNA, 65 nt, Human
gucuggaagugucuuguuaagugggaaaguaagucaaccaaauagaaacaaggggcuugccagac

SEQ ID NO: 4198549 - RNA, 69 nt, Human
gucuggaauuauuuuccugcugauauuuggugaaguguauccaauauaucacauggaaugauuuuagac

SEQ ID NO: 4198550 - RNA, 74 nt, Human
gucuggacuuaggggcagggacuacaagagagaggacuacccucuccuucuguagucccugucccuaagguggc

SEQ ID NO: 4198551 - RNA, 74 nt, Human
guuguuugaacuuuuccagacaaggaaagaugauuuuuuccauauuuguguggcaaaagggauauucugacagc

SEQ ID NO: 4198552 - RNA, 70 nt, Human
guuguuuguggagguagaaaugaagcucuggugaucaaccagcagggcucaucaagccucuccgccuggc

SEQ ID NO: 4198553 - RNA, 84 nt, Human
guuuaaaaaaaauucuaagcuacuaauuaaagggaaaaaaauuauacucuuaguaguucuagaggcugggaauuauuuucaaac

SEQ ID NO: 4198554 - RNA, 99 nt, Human
guuuaaagauucaguuugcuaucaaagauaauguuuccuuauucugcaguuuaauuagcaaggaggaagcauuuuaucucaaauacugauuuucuaaau

SEQ ID NO: 4198555 - RNA, 79 nt, Human
guuuaaauaugcuuuuuuccaggaagccacuggaaucucuaaaguguuccuggcuaacugggaaaaaauugcagggaac

SEQ ID NO: 4198556 - RNA, 70 nt, Human
guuuaacagauuuuucccucuuuagaaaucaaaaauguaauuuaaaugaguggggagaaauugguuaaac

SEQ ID NO: 4198557 - RNA, 64 nt, Human
guuuaaccaagagcauugugcacagagagaacucauaacuguguguauaagcggauugggaagc

SEQ ID NO: 4198558 - RNA, 75 nt, Human
guuuaaccuuggucaucuuccguuuccucauuauagcaauggggaaaaugcagaagauuacagcaggaguuaaau

SEQ ID NO: 4198559 - RNA, 110 nt, Human
guguuuuacuuacauauuacuuuaguuaacguuuccacaucaccaugaggugaggacuguuaauauucucacuuuacagaugggaaaacuguggcauagagaguuuacac

SEQ ID NO: 4198560 - RNA, 116 nt, Human
guguuuuauuuugcaguguuaguuuugaccucauuaugcucauuaugcuguuguaaggcuaaguaugucaugggucaaaaugaaggcaaaauagaccuuucucagcauuaaagcac

SEQ ID NO: 4198561 - RNA, 76 nt, Human
guguuuucuuucaaagcaaaaugaggcuauaucuugguagcaggaucagcuuggucuuuuuugaaaccuagagcau

SEQ ID NO: 4198562 - RNA, 57 nt, Human
guguuuugugaggccuucuuuccuggcaggguugauggugaauauccuccagaaugc

SEQ ID NO: 4198563 - RNA, 88 nt, Human
guguuuuguuuguuuuaguuuguuuuccuuuuucuaugauuaugugaauaguuuggaagagaaaaauauuuagaaaggaagaaaagau

SEQ ID NO: 4198564 - RNA, 73 nt, Human
guguuuuuacaugccuuacuauccugcuuuuucuuccaagaugagguucaggaaaugggcaaaguagagacac

SEQ ID NO: 4198565 - RNA, 60 nt, Human
guguuuuucucucagccuguagaaacuugcucauugaguuuuagaguugggagaaguuac

SEQ ID NO: 4198566 - RNA, 64 nt, Human
guuaaagcuuaggauagggaauauauauguauguguauaugaaaugaugucuucgaguuuuaac

SEQ ID NO: 4198567 - RNA, 109 nt, Human
guuaaaggacuguuauuguacuugaucuuauagaauguuuuuauauguguuuauaaggacuauauauaauuuucaagcuuuucuaagaugaggaaguaaagucacuaac

SEQ ID NO: 4198568 - RNA, 80 nt, Human
guuaaaugaagcccauuuguacagcacauugcaauucacaaagcacuuucccauaugugcuugcagaugagccucauaac

SEQ ID NO: 4198569 - RNA, 69 nt, Human
guuaaauuuuaguugcugagccagauccuuuagacaagaaauacuggcuuccaguaaucaggauuuaau

SEQ ID NO: 4198570 - RNA, 60 nt, Human
guuaacaagguguagagguuuucucucugaagguguuuaaauuccucuaacuuugcugac

SEQ ID NO: 4198571 - RNA, 57 nt, Human
guuaacaaugaggaucuguucugaggagugcauccuuaggcgauuucaucauugugc

SEQ ID NO: 4198572 - RNA, 66 nt, Human
guuaacgaaugccugccugucacauguggggccuuuauuuuguguucagcaggcaccuucuuugau

SEQ ID NO: 4198573 - RNA, 97 nt, Human
guuaacuauauugcaauaucuuaaaugcaugauagacauaaagccaagugucacuuaaugucgggcaugcauucugagaaaugcaucacuaggcaac

SEQ ID NO: 4198574 - RNA, 69 nt, Human
guuaagauagaauuauggaaagcaucuuuuacaugugauaaaagaugguuucuguagguuuauugaaau

SEQ ID NO: 4198575 - RNA, 69 nt, Human
guuaagcacaguggcuuuugugucugcagauuugagcugaaauuccaguucugcagcauagggcuuaac

SEQ ID NO: 4198576 - RNA, 74 nt, Human
guuaagccaucuuguuuauauguuaagaguacagggaagcuauuauaauguguuuaaagcaagaauggcuggau

SEQ ID NO: 4198577 - RNA, 55 nt, Human
guuaagccuucagaguuggcuggucacauagacaacuauggcugagggccuugac

SEQ ID NO: 4198578 - RNA, 122 nt, Human
guuaaggcaggaaccggccauuuucacuucuuuugugauucuucacuugcuucaggccaucugaauguauacgugcaggucacaggggauaugauggcuuagcuugggcucagaggccugac

SEQ ID NO: 4198579 - RNA, 61 nt, Human
guuaagggcucugugcuugucccauguguuaacauccuaugggccaagcaagacccaugac

SEQ ID NO: 4198580 - RNA, 71 nt, Human
guuaagguaaucucauuagggaccgugaaagaauaugagaauucugucugucuuuagugagauugccuugc

SEQ ID NO: 4198581 - RNA, 67 nt, Human
guuaaguagaaggcauuuugggauagauccuaauagcaucuccccuauacaggcuucuuuacaugac

SEQ ID NO: 4198582 - RNA, 107 nt, Human
guuaagugucaggagguaugggugccuucuuuugaagggcguugugugaccugacagguguaagccaagcucuuuaaaggccaaaaggaugccauccccuguuugac

SEQ ID NO: 4198583 - RNA, 116 nt, Human
guuaaguuugaauuucagauaagcaaugaauaauguuuuuguauaagcaugacucaaauauuagauaggacacacuuaaaacguuaugcauuguuuaucuaaaauccaaauuuaau

SEQ ID NO: 4198584 - RNA, 71 nt, Human
guuaauaaauuaucuuggguaacuuugugcagauguuugucuuucuauugccagauuacccaggauuuggc

SEQ ID NO: 4198585 - RNA, 70 nt, Human
guuaauaucaggaagaacacgugaaauggagaauuucagggcuaacauuucuuguuuuguuucugaaaac

SEQ ID NO: 4198586 - RNA, 66 nt, Human
guuaauauugagcacaaacguuacuagagagugacuaucucucucaguguggugcuuaggauaaac

SEQ ID NO: 4198587 - RNA, 75 nt, Human
guuaaugacuaguccacauuuguaaaauaaauugucuuuaagaggacauuguuacaguuguagaaagugguugac

SEQ ID NO: 4198588 - RNA, 71 nt, Human
guuaauggaagacucauaugccaggguaaagugucuuuauuuuauucuaaguaugaugggaggccauugac

SEQ ID NO: 4198589 - RNA, 92 nt, Human
guuaauuagugcacuuggguuugagagguggguaacaagcugccgcucugcauuuggugguuccuuuuccgaacagguggcaacugacugac

SEQ ID NO: 4198590 - RNA, 58 nt, Human
guuacaaaggacugggggccacaggucugagugugagcccaguagcauccuuuguagc

SEQ ID NO: 4198591 - RNA, 60 nt, Human
guuacaacugaagcuaaugugcugaugggcucaguucccaccaguagaucaguuuguaau

SEQ ID NO: 4198592 - RNA, 68 nt, Human
guuacacauaucuucuguggcuguucucgcauucuggugacagaacucagugacagagacuguguggc

SEQ ID NO: 4198593 - RNA, 94 nt, Human
guuacacugguguguuggguguuuccugaugaauaucucugaagacaauggagaaaugacacacaugagacauuuccagcagaccugaguuaac

SEQ ID NO: 4198594 - RNA, 59 nt, Human
guuacagcuugaugagagcgcgaggaauccuuuuuccuguaccuaaacucagcuguaac

SEQ ID NO: 4198595 - RNA, 63 nt, Human
guuacaguaaaugugguagaaacuguuaaucgcuuaaugccaguuuaaaucauguuuuguaac

SEQ ID NO: 4198596 - RNA, 76 nt, Human
guuaccagaaggaauaugaaugcauggaaaaaaauuuggugauaaauuuccaugaucguuauagaacucugguaau

SEQ ID NO: 4198597 - RNA, 74 nt, Human
guuacccuggguguccacguuggggugauagcagggcgugaggaacuucacugugggcgcauuguaaggguagc

SEQ ID NO: 4198598 - RNA, 103 nt, Human
guuaccuaggcugguuucaaacucuggccucaauugauccucccaccuuggccucccaaagugcugggauuacagucaugagcugccacaaccagccuguaau

SEQ ID NO: 4198599 - RNA, 61 nt, Human
guuaccugaaugucuuauugcucguuguaucuagcauacaaacaauagauauucaguaagc

SEQ ID NO: 4198600 - RNA, 77 nt, Human
guuaccugaugcuucaagcuuccuuauaaucuccuugccaaggggguauuuuaugaauaauuugauguaauaggaac

SEQ ID NO: 4198601 - RNA, 95 nt, Human
guuacgucuagucucugagguggacauguaaaggcucaaggucuccgauuuccugcgacggccuucucuuuugauguccaaaucaagauaugaac

SEQ ID NO: 4198602 - RNA, 64 nt, Human
guuacucucaucccaaguaacugccaucauauuuguuaaaauagcaauguugggguuagaggac

SEQ ID NO: 4198603 - RNA, 62 nt, Human
guuacugaacuucucugagccucaguguucuccucugcauugaccugcucugaaauucaaac

SEQ ID NO: 4198604 - RNA, 72 nt, Human
guuuccucuugggagucccaggacauagggcagggacugcccuguggaccugcucuuagagaccuugggaac

SEQ ID NO: 4198605 - RNA, 60 nt, Human
guuuccugacccuggcccagcagguaggauugcuggcuauguuaucuaggccuaggaagc

SEQ ID NO: 4198606 - RNA, 56 nt, Human
guuuccugacuguggaauuauauugagugauuggacugauugcaguucaggauaac

SEQ ID NO: 4198607 - RNA, 66 nt, Human
guuuccugcccugucuuauccagacauuuucaucccccuuuuucuggccuagaccaguaagggaau

SEQ ID NO: 4198608 - RNA, 57 nt, Human
guuuccuguggccacagaauaaacgaaacuaacuguccuggggcuucuucaggaaac

SEQ ID NO: 4198609 - RNA, 88 nt, Human
guuuccuuaauuugauagauucuuuacucagauuuuguuauugcagauuauggaauauuaaaguaaaaguaaacaaaaagagagaagc

SEQ ID NO: 4198610 - RNA, 64 nt, Human
guuuccuuugccaguaaauggggauaugauccccuacaauauuauaguggaaauuaaaggagau

SEQ ID NO: 4198611 - RNA, 75 nt, Human
guuucuaacaugcuaauuugcagauagcagaguaauuauaauucuccucuuugucauagcauaguaaauuggagc

SEQ ID NO: 4198612 - RNA, 76 nt, Human
guuucuacaagauaauuuauucugaguuucaacuaaacaaugaccuuggaauaugucuguuuuguaaauuugaaac

SEQ ID NO: 4198613 - RNA, 55 nt, Human
guuucuaccuuccugauaacuggugaauucaccaugguaacaguugaguagaaac

SEQ ID NO: 4198614 - RNA, 123 nt, Human
guuucuauaguuuuggagauacaugagucacccugcagggcuaauggggcaaguaggcugcccuacuuauucuuuuggcuuaugaguuugauaauggaagugaaaauugagaauugaagaaau

SEQ ID NO: 4198615 - RNA, 64 nt, Human
guuucuauuaugguacuuaucaugauacuguuuaucaugcuuuuauaguuuuauaguggagcac

SEQ ID NO: 4198616 - RNA, 69 nt, Human
guuucucagcaugucaguacaaccauaaguuccuugaagauagggaauguauuccaaaaugcugaggau

SEQ ID NO: 4198617 - RNA, 64 nt, Human
guuucuccaauuuccuugucaggaaggauugcuagucaucuugaaaauugagguugaaggaagc

SEQ ID NO: 4198618 - RNA, 70 nt, Human
guuucuccucugugucuuguuuaacuuuucguguuagcgaaauucacaaauuugaccaaggaaccggagc

SEQ ID NO: 4198619 - RNA, 72 nt, Human
guuucucgcuauagcaagcuuugagcuuucagagaacuuauauuugaaaacuggaucuucuauggcagagac

SEQ ID NO: 4198620 - RNA, 67 nt, Human
guuucucuccuuagaggaggcaagagcucacuagucuuucaauguaugucuuucugaggagugggac

SEQ ID NO: 4198621 - RNA, 63 nt, Human
guuucucuuuggacuuuuucccucuuguaaauugauacugaggguaugaagccaaggaagaac

SEQ ID NO: 4198622 - RNA, 70 nt, Human
guuucucuuuugugaugugagaugggcgucuuacuccagugcugcaacauguucauuacagaggagaggc

SEQ ID NO: 4198623 - RNA, 58 nt, Human
guuucugaacaguacuuggccaguuucuuuaacaggagauggcuuugcuuuuagaagc

SEQ ID NO: 4198624 - RNA, 72 nt, Human
guuucugagggaugcagcugugugccagagguaccgagaaaugccccauacacaugcauguacuccaggagc

SEQ ID NO: 4198625 - RNA, 64 nt, Human
guuucugcagcggagaaagguuaugcuucauaugacuucguuuucucucugcaaauuaagggac

SEQ ID NO: 4198626 - RNA, 104 nt, Human
guuucugcugaguuggcuguucuguuauauagauaauguguguguguguaugugugugugugugugugugugugugugugugauguacauuuaauucacaaaac

SEQ ID NO: 4198627 - RNA, 130 nt, Human
guuucugugguuacuuggccuccuuuccuggaggacagcacaggcaggggaacuauaggugugauccaccuauagaucccccguaugugugauaaagaggaaaggcagugauaaggccuggacccagucc

SEQ ID NO: 4198628 - RNA, 69 nt, Human
guuucuguugcucagauaaugcagucucaucucgucugugauuucagcagcacucauggcaaugggaac

SEQ ID NO: 4198629 - RNA, 114 nt, Human
guuucuugagucauaggaagcugcucuccauguguuacuuucaggguaguuaagguaauuuaaugcaaaugaccuuaaaacugacacauggagagcagcuaugacucaagaaac

SEQ ID NO: 4198630 - RNA, 60 nt, Human
guuucuuggccuuucuauagcagaguggcuggauucugaaagggagaacaccaagagcac

SEQ ID NO: 4198631 - RNA, 58 nt, Human
guuugaaaccuaugugugcugacaucaccacugggcugggacacuguagauuucaaac

SEQ ID NO: 4198632 - RNA, 66 nt, Human
guuugaacaaccuggccccagauuccccaucugugaaggggcacugaggcuaggucguacuugggc

SEQ ID NO: 4198633 - RNA, 63 nt, Human
uaagagcaaaaggucuguauuagaguuucauccuuauaugaaauuuugcagaucuuguuuuug

SEQ ID NO: 4198634 - RNA, 98 nt, Human
uaagagcuaauugcuuaaaugaccagaauacaggcuuccaagcugaucuuuguagaaaggccaaggcaagccuguaucauuuaaauuuuaguuacuua

SEQ ID NO: 4198635 - RNA, 93 nt, Human
uaagaggaggagauuggaaggaggggcaaagcaguucauggggaucccuggaacugaguccagcucauccaaagcuucuaucuucugcuuuua

SEQ ID NO: 4198636 - RNA, 64 nt, Human
uaagaggggaguccuaaucugauucaccuugaguggggaagaucaguaaggacuuuaauucuua

SEQ ID NO: 4198637 - RNA, 55 nt, Human
uaagagguugcuuggcagcauaaggagacacuugagcuucaaagccauccuuuua

SEQ ID NO: 4198638 - RNA, 97 nt, Human
uaagagucuuauuuggaagucgggaaagcaaaauugauuucacaaaauagggacaaacugacauggauuaaggcucccauuuccaauuaauuucuua

SEQ ID NO: 4198639 - RNA, 84 nt, Human
uaagauaaaccuguaauucuuguucagagguaguaagcuguaggucggguuauugaagaacagagaauuauuagguuucuuuug

SEQ ID NO: 4198640 - RNA, 76 nt, Human
uaagauaugacagcucuagcacacaguagguacucagaaaauguuagccucugugcuggacugauuucauauuuua

SEQ ID NO: 4198641 - RNA, 102 nt, Human
uaagauguuugcuggagaaaccuauuguuuacugaaagcacucaaugaagucaaauuacugaagcuuuugccuacaucuuggucuuuuauguaaauauguua

SEQ ID NO: 4198642 - RNA, 72 nt, Human
uaagcaacugucugucaccaaaacagacucuucucacuaguguuuacagucuaguuggugagacagagcuua

SEQ ID NO: 4198643 - RNA, 59 nt, Human
uaagcaggcugugguauguugggcaaaguacaaaaugccucucagccacaguuuccuua

SEQ ID NO: 4198644 - RNA, 115 nt, Human
uaagcauuauaacuuaaccuaaagaauggcuuuggcaggaauuucaagcacagacagacuugauauuccucccaaagccguucuuuagguuaaguugguaaaaaagagaugguua

SEQ ID NO: 4198645 - RNA, 130 nt, Human
uaagcauuuuauccaaguacaaauguuaaaagcagaguaacuuaagcaauuguguauacaaagguauacagacacuguagguuauuuuucuucuugaaucauuuuugcugcauaguaaauugcaauuaca

SEQ ID NO: 4198646 - RNA, 70 nt, Human
uaagcccacauuuuucugaagacucuaccuaugauuuuuaaauauaggcuucuuggagaggguggacuua

SEQ ID NO: 4198647 - RNA, 62 nt, Human
uaagcccuauuaugcaaauauuccuaccugaguagaaaccucaggaggcaugaggggauuua

SEQ ID NO: 4198648 - RNA, 72 nt, Human
uaagccucugacuaacguaacucuuaaguuuugcucagcaauugcauugagagugacuuggacaauuaauua

SEQ ID NO: 4198649 - RNA, 108 nt, Human
uaagccucuuucaauuaugguaaguagucuauuugcaugugucuaauccagaugucugccuauauggauaaaugugcagaugacaugcuauguuuguuugcuugcuug

SEQ ID NO: 4198650 - RNA, 96 nt, Human
uaagccuggagcugaggggccucuggggagcagcccuggugaguugggucaccucauuucaugagggccagcccucggggaggcuccacaggcuua

SEQ ID NO: 4198651 - RNA, 82 nt, Human
uaagcucugcaggcuuauaggaugggugugucaggcaucauuuaggggacagacccaagucaucuggcuuguuuagagcuua

SEQ ID NO: 4198652 - RNA, 57 nt, Human
uaagcugaaagugcuuugaggacuaguacucuaucuuauuugucuauuuucagcuug

SEQ ID NO: 4198653 - RNA, 100 nt, Human
uaaggaaaaggcaggcagcugcuggguucagccugugggagaaaacaaccuacaaagugcucggugaacucaucccucagcugcagcgucuguuuccuua

SEQ ID NO: 4198654 - RNA, 73 nt, Human
uaaggaaagcacagagcucccacaggaaaccuuuuauaucucuggaguucugugacaucuuuggcuuuucuug

SEQ ID NO: 4198655 - RNA, 130 nt, Human
uaaggacagccugcccccuaggcuggccccuuggggaggaugcaggcugcuuccaggaggugcccuaugccaccccucagagccaugccugaguucugcugccagccccuccggcaggagguuggccuug

SEQ ID NO: 4198656 - RNA, 90 nt, Human
uaaggauauucccuuuuagcauuuggcaccaguuauuuuacaccaacuugugaagcacagugccaaguucuauugccuggaaucuccuua

SEQ ID NO: 4198657 - RNA, 57 nt, Human
uaaggcugauuagacugauagcuuuuauaauucaaggcuaaccagcuaacaguuuua

SEQ ID NO: 4198658 - RNA, 95 nt, Human
uaagggagaagagguuuuuggagugaggcauugaagaccggaauagagguuaagucacccaaugccuuauuuugggauauuacaauuuucuguua

SEQ ID NO: 4198659 - RNA, 81 nt, Human
uaagggugguccaugucgauaggagugccaucggccaggcccaccgaggucaucccacuccucuccacaaucacgcccuug

SEQ ID NO: 4198660 - RNA, 80 nt, Human
uaagguccucauuguguacauguaucaacuaucguuuucaaaugaaauagacacagugcuauacagugcuuuaaaccuug

SEQ ID NO: 4198661 - RNA, 65 nt, Human
uaagguuaaccaaggcaccaaguguacuuuuacaaggucacuguugaacccucuugguggcuuua

SEQ ID NO: 4198662 - RNA, 61 nt, Human
uaagguuaccuauaaugggaagucucuaccuguaucaugguacugccuuuagguauccuug

SEQ ID NO: 4198663 - RNA, 59 nt, Human
uaagguuuggcugucucuugguuccuauuugaaugccacauugagacagucaaaguuug

SEQ ID NO: 4198664 - RNA, 83 nt, Human
uaaguaaauucuguuucacaguauuuguuuuucugaguguacauaauuucacucuuuuaagaacugcugauagaaguuacuua

SEQ ID NO: 4198665 - RNA, 82 nt, Human
uaaguagggugaguaaagguagagaauaagguggugguauuugagguacuuugauaagguucuucuauucuuaccuaacuua

SEQ ID NO: 4198666 - RNA, 77 nt, Human
uaaguauuauaaauaugugcaugaaaaugcaauuugauauuguauuucgaugcacguguaguuuauauuguugcuua

SEQ ID NO: 4198667 - RNA, 66 nt, Human
uaagucaggaaauggacaucuuugcuguuugaccgcugggcagagaaauaaucauuuccuuccuua

SEQ ID NO: 4198668 - RNA, 66 nt, Human
uaagucaggaggucuccugacacuuugccuuuugauaaggaacagucagggguacuuuuuaacuua

SEQ ID NO: 4198669 - RNA, 70 nt, Human
uaaguucaucucacagauaggcaguuucaaauacucuguacuuggaaacuguuucuugaaauagaacuug

SEQ ID NO: 4198670 - RNA, 71 nt, Human
uaaguuccucuucucugcagggaacauugggagcuccuuaccaaauuccuggucagcagaagaguaacuug

SEQ ID NO: 4198671 - RNA, 61 nt, Human
uaaguucugacucugaaucugggaauguggucaccuuccucagagacaaguugagagguug

SEQ ID NO: 4198672 - RNA, 90 nt, Human
uaaguuugacccucuuaacuguauagcuuggacuaaaauucaaaauguaagcuguuuuauucaaaugcaguggggucacuaauugauuua

SEQ ID NO: 4198673 - RNA, 60 nt, Human
uaaguuuuuauguuuuagcugugaugacugaagucaugaugcuuuaguucaaaggacuua

SEQ ID NO: 4198674 - RNA, 95 nt, Human
uaauaacacacuuaacauaaaaaggacagauguggucuucuauuaauaaaaugagagacuugccugcucuuguuuugggauuaaauguuuuauua

SEQ ID NO: 4198675 - RNA, 88 nt, Human
uaauaacuuuucuaaaacauccuaccuacaaucuugugugcaaauugguggcucaauucugcaacuguuguuggugguguuguuguua

SEQ ID NO: 4198676 - RNA, 66 nt, Human
uaauaauaaccuuggcuguuauugugccuuuccaucaaggcacaauacuagccaagguuauuauua

SEQ ID NO: 4198677 - RNA, 94 nt, Human
uaauacauacggagaaaccugaauguaugucagaagcaugugaucuacauuuguuugcuuucguuuuaaauauucaugguuuccgaauauauua

SEQ ID NO: 4198678 - RNA, 72 nt, Human
uaauaguauugagagguggggccuuuaagaggugauuaagucaugaaggcuccacccucauggaugcgauua

SEQ ID NO: 4198679 - RNA, 74 nt, Human
uaauaucugcuugaguuugaagucaggaauuugccaaacaugggcucugaugacggauuucagcaugaggguua

SEQ ID NO: 4198680 - RNA, 62 nt, Human
uaauauggacagaguggugguugagggugccggcucuggcaucaaaccacuuugccaaguug

SEQ ID NO: 4198681 - RNA, 62 nt, Human
uaaucagaaauucuacaucacaauggcucagaauuuugucauaggauguuugcuuuugguua

SEQ ID NO: 4198682 - RNA, 94 nt, Human
uaaucagcacgugacgagcacagaaaaaaauucacagugaauauuugcugaguaaacacgugggguuucuuuccaugcuuuucaaggcugauug

SEQ ID NO: 4198683 - RNA, 94 nt, Human
uaaucaugcaaaccacuaaauguuucaaugugggagggagaaaacauuaccauuuaaacucucaucauauuuuuauuuacugacugcaugguua

SEQ ID NO: 4198684 - RNA, 83 nt, Human
uaauccaccacagggagcggagucccaugccuugugguucuuuucaucccuacuuagguaauugcucagcucccauuggguua

SEQ ID NO: 4198685 - RNA, 55 nt, Human
uaaucccuagaguugagcaaauaaaccaugucuggccaaucagcuauagggauug

SEQ ID NO: 4198686 - RNA, 62 nt, Human
uaaucuacuguuuauaugaaaugucuggaacaggcaaacccauagagacagaaauuagauua

SEQ ID NO: 4198687 - RNA, 56 nt, Human
uaaucuagucccacauggaauucacugcaaaugauuucuaaaugugggcaggauug

SEQ ID NO: 4198688 - RNA, 58 nt, Human
uaaucugaccucccagugauagauuuacuguuucuacuuagucaccuggaucagauua

SEQ ID NO: 4198689 - RNA, 122 nt, Human
uaaucugcaaaucuguguaucaucaugagauaaagcaaauaggacuauugcauuccaauucuguacagucuucuuaaugcuuuucauccucugugauuuauauuauucaagauuucauauug

SEQ ID NO: 4198690 - RNA, 57 nt, Human
uaaucugguugcucugagaauaguuuggguccaaaucuuauuucaguugcuagauug

SEQ ID NO: 4198691 - RNA, 67 nt, Human
gugcaauccaguugauuuuuacauugaaaggucacaguucccccucugagagucugacggauuguac

SEQ ID NO: 4198692 - RNA, 91 nt, Human
gugcaauggcuaggccacugguucugauguucuuggcuucuuccuuauggucacaagauggcugcuucaguaccaguucuuauaucugcau

SEQ ID NO: 4198693 - RNA, 78 nt, Human
gugcaaugucugggucacagccagagaaagggcacugccagaggcauguuuauugcucuugcuggccaaacauuccau

SEQ ID NO: 4198694 - RNA, 85 nt, Human
gugcaaugugcauuauugaaggcccuguggacagcugggauagcccagugaugcccaagggccuagucaaaaguggacaaagcac

SEQ ID NO: 4198695 - RNA, 62 nt, Human
gugcacacaagcacaugcauacauaccugcacauacaugcacacacgugugcuugugugcac

SEQ ID NO: 4198696 - RNA, 87 nt, Human
gugcacacacccucagaggaccuguguggccagagccuucuaaauggugagcuggauaccaggguucuugacuugggucuguugcac

SEQ ID NO: 4198697 - RNA, 57 nt, Human
gugcacacauacaugaacgcugcacacaggugugcacgcucacacacgucugugcac

SEQ ID NO: 4198698 - RNA, 62 nt, Human
gugcacagaaauugguaagacuuguaaaaccuugguuuaccaggucuggugaugucuugcau

SEQ ID NO: 4198699 - RNA, 97 nt, Human
gugcacagcagacucagcaguagggccaggagggaggcucugggguaguguggaauccccggcuccuccgcccuugcucacgcacaccuguuuucau

SEQ ID NO: 4198700 - RNA, 63 nt, Human
gugcacagggaccugugagcuccauagacucaucugggaagaccugcuccagucccuccguac

SEQ ID NO: 4198701 - RNA, 75 nt, Human
gugcacauaggucauagguagaauaauaaaacucuagugucauaauuauuuuaugugcggccugauuuaaugcau

SEQ ID NO: 4198702 - RNA, 68 nt, Human
gugcacaugaaaguugggggcuauaggccugaugggggcucaggccaaacccagcucucguggugugc

SEQ ID NO: 4198703 - RNA, 55 nt, Human
gugcacccccaaggagguggagcauaauucuccccuccuuaaauaugggcugcac

SEQ ID NO: 4198704 - RNA, 64 nt, Human
gugcacccugggauuuccacagccacguggauuuuaagccaaauccaggaugaucccaugacac

SEQ ID NO: 4198705 - RNA, 125 nt, Human
gugcacuccaucuaggguaccaaccaucucagugugcccgagacugauggggcucccagaaggcaagacuuucagugcuaaaaagucucaagcaaaccgagaugagucacucgcuggcugugcau

SEQ ID NO: 4198706 - RNA, 101 nt, Human
uaacucuucucuguguuuuguccauuucaaaugauaugugcccuaguuuggguucacuagaaacagauguuuuugaagaaucagacacacaagaagaauua

SEQ ID NO: 4198707 - RNA, 76 nt, Human
uaacuggaucauauaucaguacucuccaagugccccucacuggaagugcuaaacuggagugugauucucagaguua

SEQ ID NO: 4198708 - RNA, 129 nt, Human
uaacugggauggguguuggaguaugggggauagcauaggaaaguacugggaaccgucaaucagucgcgguggccuugagagaucaaaaggugcugaaagcccccugcccgcaaaacacaccucuaguua

SEQ ID NO: 4198709 - RNA, 106 nt, Human
uaacugugggugugguuauuugcauaugaagcugacuuaaauaggugagaugucuacaaaguuuuaaggagaguuuuacugccaaaauaaccauaagcuuggguua

SEQ ID NO: 4198710 - RNA, 64 nt, Human
uaacuucucugggacaggaacaguuuaagcuucuguuuacacugucauuucucgggcaaaguua

SEQ ID NO: 4198711 - RNA, 78 nt, Human
uaacuuucccuauguucucuccagcaaaguaacuuuacauuguagcugaaggcuacagcagaacaaagguagaaguug

SEQ ID NO: 4198712 - RNA, 67 nt, Human
uaagaaaaggucuacaucacugaaagaccuugaguugaguguuuuuguguguguuagauuucucuua

SEQ ID NO: 4198713 - RNA, 96 nt, Human
uaagaaauccugaguaauauguaaaugguugugacauucccuuccucugauaaagaaaugcagaaaggcuucacuuauuuauuuuagguagacuua

SEQ ID NO: 4198714 - RNA, 86 nt, Human
uaagaaauucauaguaauggaugugcuaagggaguauaaaguaaaauaauuuaauacugacuaaagauaucaaaaugaauuuuuua

SEQ ID NO: 4198715 - RNA, 121 nt, Human
uaagaagaaaugauuagguaaaaugaagcauguuuccagaccuuaugacauaaauuuuaucuuaacaugaaauaggaaacagauguuucuccuccuuugcuugcaguauuuuccucucuua

SEQ ID NO: 4198716 - RNA, 93 nt, Human
uaagaagacagggcuccaaggaaguguagcuauuuguccaaagucacaauaccauucaguggcuaagcugugacuuggacccgagucugauua

SEQ ID NO: 4198717 - RNA, 68 nt, Human
uaagaagacuugcuucaagggcucucuucuaccaugaauuagcuggguggccuuaggcaagucacuua

SEQ ID NO: 4198718 - RNA, 85 nt, Human
uaagaagugccuaaguuuuucaguucuguacaaguccagagagcaaacuuauuuguggcugucgagaauugagggucucuucuug

SEQ ID NO: 4198719 - RNA, 72 nt, Human
uaagaauacacauuguauguuucugugcacaugacagugugugugugugcacguacauacuguauagucuua

SEQ ID NO: 4198720 - RNA, 80 nt, Human
uaagaauacagaucucugggcacaugccagaagguuaaauuuggcagaggcugggguuugcucaguucucuguauuuuua

SEQ ID NO: 4198721 - RNA, 65 nt, Human
uaagaauaguaguugaagcaggugaauauggaggaauaacucuucccuucuccagcuuguucuug

SEQ ID NO: 4198722 - RNA, 65 nt, Human
uaagaauauugggaauggaugggaaaagacccugaaggcucaaaucaucuguauuccuguucuug

SEQ ID NO: 4198723 - RNA, 87 nt, Human
uaagacaggaaaacauaguggucaggcuuuggacucuccacucauucuucccaaguucaaaucccugcuccacuauuuccuaucuug

SEQ ID NO: 4198724 - RNA, 60 nt, Human
uaagaccauacauuuccacagauugcuuugccugcuguauaaugagagugugugcucuug

SEQ ID NO: 4198725 - RNA, 75 nt, Human
uaagaccaucaggcugauaggaggaacugauacuaaauagaguuaucagugacucagauguagucaaguggcuug

SEQ ID NO: 4198726 - RNA, 72 nt, Human
uaagacuauacaguauguacgugcacacacacacacugucaugugcacagaaacauacaauguguauucuua

SEQ ID NO: 4198727 - RNA, 88 nt, Human
uaagagaaagugacuugaggcaaggcugaaugaaggcauaaaucaagcgaugcaggccucauuggucuugcuggggauuuuugucuug

SEQ ID NO: 4198728 - RNA, 63 nt, Human
uaagagaagucagggucugcaccaggcacagcccaacaccagguacagccccugcuucuguug

SEQ ID NO: 4198729 - RNA, 69 nt, Human
uaagagcccaguucuauauuguguuuaauggcaaacguccaugcaacacaaagaagcugcaggaucuua

SEQ ID NO: 4198730 - RNA, 62 nt, Human
uaagagcuaggauuuuaaaucagccaauguugauaaaguugauuguaaaauguugguacuua

SEQ ID NO: 4198731 - RNA, 72 nt, Human
uaagaggcaaaagauacucagauuucugccucaauaauaauuugguauuuauuugaguguuucuuccccuug

SEQ ID NO: 4198732 - RNA, 79 nt, Human
uaagagguaagguauagugaacaagagcaaggaccuagaaacccaaccauccugaguucaaguuaugccuuuacccuua

SEQ ID NO: 4198733 - RNA, 75 nt, Human
uaagauacaacgcuagaauagccaggagaacauccuuagugaaauauagggagccauggcauuuuaugugucuua

SEQ ID NO: 4198734 - RNA, 67 nt, Human
uaagaugaggaugguuaaagaacauuguuuagaaauaggcaaguucugcgcugauuauccuuuuuua

SEQ ID NO: 4198735 - RNA, 78 nt, Human
uaagaugcagaugccugggcugcaccacccuuugagacuuuaagcaggucauggugggguccaggaaucugcauuuua

SEQ ID NO: 4198736 - RNA, 71 nt, Human
uaagaugggcucaaacuggagguuguuugaaaauuuaaaaucaaacugcucuuaccagaugggucagcuug

SEQ ID NO: 4198737 - RNA, 56 nt, Human
uaagauguggaaucacagcuucagcucaggcagcgggaggcuggaugcccaucuua

SEQ ID NO: 4198738 - RNA, 89 nt, Human
uaagcaaacgacauagccuggcugggccugauuucucaucuauaaaaugggaauggcaccaccggguuugagaauuguguugauguuua

SEQ ID NO: 4198739 - RNA, 79 nt, Human
uaagcaccaaggagccacauacaaccuagaccuucacaaauuaauuccuauugcuacuggucuccuuggccucugcuua

SEQ ID NO: 4198740 - RNA, 57 nt, Human
uaagcacuuuauaugcuuuaucuaauuagcuauucuugaagcccugugaggugcuua

SEQ ID NO: 4198741 - RNA, 56 nt, Human
uaagcauuaacucugcugcaaggucuguauuuuaacuuugugcagaugugugcuua

SEQ ID NO: 4198742 - RNA, 120 nt, Human
uaagccaaggaauccaccuugacuuauaaugguuaaauggguuaacccauuuaagauugugaaccuauaaaugugguuaacccauuuaagauuuggaagggugguagauucuuuggcuua

SEQ ID NO: 4198743 - RNA, 63 nt, Human
guugcuaaugauuccugaucuccugucaccggacaccuuguggcaugacagugaaugggcagc

SEQ ID NO: 4198744 - RNA, 72 nt, Human
guugcucaagaugguguggucaaggaccaacagcaguuggcaucaccuccacgaucaucuggugauaguaac

SEQ ID NO: 4198745 - RNA, 110 nt, Human
guugcuccaucucuaagagacucaggucuacaggccacugauagccaggcugcccagcucuaagcacugagcaugagugggcuguggggucauauuuggagcaaagcaac

SEQ ID NO: 4198746 - RNA, 129 nt, Human
guugcucgggagccuguuggcaccuuacaaggccugaguucuuuggugugugagagaagaguuuguuguuguuguugguuuucacccacuagagaacucagggugcaacaacuaggcuaccuuggggau

SEQ ID NO: 4198747 - RNA, 57 nt, Human
guugcucucugguuucgcaggaaauagauuguucuaaucuuugaaaucagggucaau

SEQ ID NO: 4198748 - RNA, 57 nt, Human
guugcugagagacagaguggaaugguauuuccauuuuucuaacucucagaauccagc

SEQ ID NO: 4198749 - RNA, 110 nt, Human
guugcuuaaucguauuccauuguauggagaugacacaauuuauuuauccguuuuccuauggauggacauuugaguuauuuccaguuuggggcuuuuacaaauagagcagc

SEQ ID NO: 4198750 - RNA, 61 nt, Human
guugcuucuccucucugacccucugucuccuucucugucuggugggcuuagugagagcaac

SEQ ID NO: 4198751 - RNA, 77 nt, Human
guugcuuuggguguuuuagucuuuaugguauguaugugugguuuauauauacaacuagauuaaaagauucucaagac

SEQ ID NO: 4198752 - RNA, 96 nt, Human
guugcuuuucuuauuuggcaaauggguuuuuguacuuuacgucugucugagguuuauaauaugcugaggucauuuccaagugauuuuucaagugau

SEQ ID NO: 4198753 - RNA, 91 nt, Human
guuggaacaugauuucucugauggauaauuagcuguuuucaggacuccuccuauucagcugaauguucucagaccagaagucugaucuggc

SEQ ID NO: 4198754 - RNA, 59 nt, Human
guuggaagaagacuguaaauuaugcuaauuauaaagcccgugaaugaucaucuuccagc

SEQ ID NO: 4198755 - RNA, 55 nt, Human
guuggaaggagccuaaaagagaccuugagaaaaaaagguccagacuucuaucagc

SEQ ID NO: 4198756 - RNA, 95 nt, Human
guuggaagugcauccuuaaccagcaucacuucagaggugcuuuaacuggaacagcacaaaauaguucaguguugguuaagaugaugauagcugau

SEQ ID NO: 4198757 - RNA, 76 nt, Human
guuggagaugugccugagggaguaagacacuaucuuacaacaacaggacucuuacucccucaggcacugcaccagc

SEQ ID NO: 4198758 - RNA, 55 nt, Human
guuggauuucaugcaguaaaguaccaauacagugagguugcugccaagucccaac

SEQ ID NO: 4198759 - RNA, 61 nt, Human
guuggcagcaagaccaccccuggacaaaaagccgaucucagggcaggucucugaugucaac

SEQ ID NO: 4198760 - RNA, 95 nt, Human
guuggccaggcuggccucgaacuccugaccuugugauccacccgccuuggccucccaaagugcugggauuacaggugugagccaccacagccgac

SEQ ID NO: 4198761 - RNA, 64 nt, Human
guuggcugcuccucagcugugcuguugaaagaugucagaguaguuuaguaagaggagagcugac

SEQ ID NO: 4198762 - RNA, 94 nt, Human
guuggcuggaggccucaguuucuuaccacuuggaccucuuuacaggcuugcuagaguguccucaugguggggcagcuggauuccuccagaugac

SEQ ID NO: 4198763 - RNA, 90 nt, Human
guugggccucucuucugcagucuccuuacuccgcaugugcacuggugguguaugcagagugggagaggugcgggcucucuggggcccagc

SEQ ID NO: 4198764 - RNA, 60 nt, Human
guugggcugaagugugugcuuauaaauguguuuaguuuuuaagcuaaacauucaguuaac

SEQ ID NO: 4198765 - RNA, 60 nt, Human
guuggggaggagauugaacauugccugugauugauagguaaguccaccucauucuucagc

SEQ ID NO: 4198766 - RNA, 57 nt, Human
guuggguaauuaagcacagaaauguucugggacaugcucugugugccaucaccuaac

SEQ ID NO: 4198767 - RNA, 63 nt, Human
guugggucagagcagagcuggaaucugccucccuggaucucgugcuucucugcucuacccggc

SEQ ID NO: 4198768 - RNA, 62 nt, Human
guugguacaugaacuuggucuuuuuaggucuauauccugucaguccagaguaaugugcugac

SEQ ID NO: 4198769 - RNA, 75 nt, Human
guugguauggugggaagagcuuggacuuucaagucagucaucuggauuugaauccuggcuuuaccacuuaccagc

SEQ ID NO: 4198770 - RNA, 99 nt, Human
guuggucaggcuggucucgaacuccuuaccuuaugauccaccugccuuggccucccuaagugcugggauuacaagcgugagccaccaugccuggcccac

SEQ ID NO: 4198771 - RNA, 72 nt, Human
guuggucauuuuaaacuagugaaguguaccuaaaauuuaaggaaacacuuagaauuaguguagaaugaagac

SEQ ID NO: 4198772 - RNA, 72 nt, Human
guuggugcaaaaguaauugcagguuuugccauuaaaaguaauggcaaagacugcaauuacuuuugcaccaac

SEQ ID NO: 4198773 - RNA, 56 nt, Human
guugguggaugugggcagagcaggauuaguuccuuucuucugcccucucuucuagc

SEQ ID NO: 4198774 - RNA, 56 nt, Human
guugguggccccugggagaugcuggcccgggagccaggggcuagggggccaccagc

SEQ ID NO: 4198775 - RNA, 71 nt, Human
guugguuggcaauguuucgaugggagcugucuuuucacaggaugguucacuuaaguaaacggucaacuggc

SEQ ID NO: 4198776 - RNA, 98 nt, Human
guugguuuaguuguggcauuuuagaacagcugacuugggacuaaagcaucuuucuaucugggaucaguauuucuaaguugccuuuaagcugaauaaac

SEQ ID NO: 4198777 - RNA, 59 nt, Human
guuguaacgcuaguaucaccaggcuaaguuccuagccaggucacacuguguguuaaagc

SEQ ID NO: 4198778 - RNA, 76 nt, Human
guuguacagcauugugucuucacucagcaaugagcaugugcuuucagcuggguuugacaucaauacaccugacaac

SEQ ID NO: 4198779 - RNA, 62 nt, Human
uagaauucaggcuuaugcugaauaauucuugggagaaauucagaaagauaugccugguuuug

SEQ ID NO: 4198780 - RNA, 55 nt, Human
uagaauugggccuaacuuccaucuauaguacuagaugaucuugggcaaguuacug

SEQ ID NO: 4198781 - RNA, 57 nt, Human
uagaauuguuguacagaauaaaugagcauuugaugugcucauuacagaguaguucua

SEQ ID NO: 4198782 - RNA, 105 nt, Human
uagaauuuauuucuuguaauaguaaccaauuaaacuaguuaccaguuggagagcauguuccagcacuuaaguuaauugaacuguugcaaacgaaauaugauucua

SEQ ID NO: 4198783 - RNA, 83 nt, Human
uagaauuugacaugucugauaaauaaugcauaaguucaauuuagcauuuaaugagcuagguacuguggggcugucacuaucua

SEQ ID NO: 4198784 - RNA, 68 nt, Human
uagacaaucucagcaaacacacacacuggagacuuacugagugacucaauguuggcuagaauugucua

SEQ ID NO: 4198785 - RNA, 92 nt, Human
uagacaauggggaggaguuguucugcaggagagaaggggacaguccuuccuccagccuggagcacuuccugcaccgcuccccaccccgucua

SEQ ID NO: 4198786 - RNA, 101 nt, Human
uagacacucauucauccagcaaauauuuacugagcagcuauuacucuccuaggugccgugggaugcaguggugaguggcaagaauggauagaugaagucua

SEQ ID NO: 4198787 - RNA, 58 nt, Human
uagacacuuauuuagugggaguuaagaucuuuuaaccucauuuccaaguaggugugua

SEQ ID NO: 4198788 - RNA, 65 nt, Human
uagacagaauccagcccacgccuguagcccuaaugcugcccugacguggucuggauuuggguuug

SEQ ID NO: 4198789 - RNA, 78 nt, Human
uagacagcuugggauagugaaacuuggguuguguuuuagaagaaacuggaucugaacaucgguaucauaaacuguuua

SEQ ID NO: 4198790 - RNA, 63 nt, Human
uagacaggguggcuuagaaacaacagaaguuuauuucucacaguucuagagacuacaggucug

SEQ ID NO: 4198791 - RNA, 71 nt, Human
uagacagugggaagagaaaugagucaagacuugagccuuucagcccuucucucuucucauccaaauguuua

SEQ ID NO: 4198792 - RNA, 87 nt, Human
uagacaucaguuuugaaauacugaugaaauacucucuacucuccucagugaugaguauuugaucagaugauaguaauuguguguuua

SEQ ID NO: 4198793 - RNA, 129 nt, Human
uagacaugcaauuggccuaacaggcagaugaguuaauuuauugguuuuuagcagugaguugcauuaaugacauuacugaugaaaacuaauaaauuaacucaucuaccuuguaagccaacuccacaccua

SEQ ID NO: 4198794 - RNA, 66 nt, Human
uagacauuggccauuccuguggcacugugcauugggcacaugaugccacgggaaugccuaguucug

SEQ ID NO: 4198795 - RNA, 75 nt, Human
uagacauuuauucauuuuuugagugccuacuucuuaccugcguauuuggggcacaaagaugaauacagaaugcug

SEQ ID NO: 4198796 - RNA, 59 nt, Human
uagaccauucuauuuccuaugcgguggugauauucaaggcaggggauagaaauggucug

SEQ ID NO: 4198797 - RNA, 69 nt, Human
uagacccuggcuagggcuuaaccuggcucugacuagaccuaaauuaggcuuaggcccuggcuagggcug

SEQ ID NO: 4198798 - RNA, 56 nt, Human
uagaccuagcagcgucucccaccagccucuacuguguuggcuugccuguuaggcua

SEQ ID NO: 4198799 - RNA, 71 nt, Human
uagacgcuauaaaggaaugaaaaggaugucuggaauuugucagguucuuaacuuguucuuccuagcuucua

SEQ ID NO: 4198800 - RNA, 107 nt, Human
uagacggguggcuuaaacauagaaauuuauuucuuacaaugcugggugcugggaaguccaaaauaaaggugugggcagaucugguuucuggugaggcccacuuucug

SEQ ID NO: 4198801 - RNA, 84 nt, Human
uagacuagaguggcucuuugagacugaauuaaaauguuugaacuuuguuacaugcagugaggaucuuagaaaucaccuugucua

SEQ ID NO: 4198802 - RNA, 78 nt, Human
uagacuagaugugguauauuagaagcagccaacaacuuuuucaggaauuucuaguucuaccacaguaauguagaccua

SEQ ID NO: 4198803 - RNA, 75 nt, Human
uagacuagcagugacugucauucuagugcccauggcuaaauggcugugggauacgugugacauacaaguuagcug

SEQ ID NO: 4198804 - RNA, 68 nt, Human
uagacucccuauauucacaccuguugcaaagugacuuugcaguucuccagaauaaaggguggaguuua

SEQ ID NO: 4198805 - RNA, 58 nt, Human
uagacugucuacacagaaacggucagauucacaggugugaccucugcagagauguuua

SEQ ID NO: 4198806 - RNA, 64 nt, Human
uagacuguuaccuauauuuaugugcccuguugggacuugcauauauuuguugguggcaaaccua

SEQ ID NO: 4198807 - RNA, 82 nt, Human
uagacuguuuugcucuggggccugaggauugcggggccagggaagcaaccaggcccagucuggggcccugugaagcgaucug

SEQ ID NO: 4198808 - RNA, 91 nt, Human
uagacuuuggcccagugaugauagggguaaaggaggaaauuuacuaugguaaauucccaacucugcucuucuuugcuaaauccaaggugua

SEQ ID NO: 4198809 - RNA, 78 nt, Human
uagagaauuggaggcaccuuguuuucacaacuaggauaaaaauagguguugauucuugcaggguccuuuccauuccua

SEQ ID NO: 4198810 - RNA, 98 nt, Human
uagagaauuguguuuguguguguguguaucuauguauguguacuuuuaauuuugguaguauacugaaaguaaauaugacaaacaaauacccuuugcua

SEQ ID NO: 4198811 - RNA, 67 nt, Human
uagagacacaauagagucaguucuacauucucacugaaaugaagguacaagaacaggcuuuacucua

SEQ ID NO: 4198812 - RNA, 62 nt, Human
uagagacacuggcuggauugaggaguagaaggcucaaacaacccaagguuaguuggucuuug

SEQ ID NO: 4198813 - RNA, 109 nt, Human
uagagacagggucucacuaugcugccgaaacucaccuuuaucauauuuuugaaggauauuugucuuucacaaucaaauggugaaaugagagcacaaagaccauguccua

SEQ ID NO: 4198814 - RNA, 129 nt, Human
uagagacagguaggaggccauuggauacauggugcaggaguguaggccuauguaggucauccaugcaugccuggcucugggaucuucgcuuuagucauuuaaaucaugggccugcugucuuuucuuaug

SEQ ID NO: 4198815 - RNA, 83 nt, Human
uagagacauauagaacaguugguuaacacaaauauucugcaaucacaauauaugugguauugaccagcuuuucaaaguuucua

SEQ ID NO: 4198816 - RNA, 78 nt, Human
uagagaccagauucugauucugauuaacugggaguacgaugauacagcuaaucagaaauugagggucugguuacuuug

SEQ ID NO: 4198817 - RNA, 59 nt, Human
uagagacugugccagccccaugcugaacuauagcagugaaugggcagacacggucccug

SEQ ID NO: 4198818 - RNA, 82 nt, Human
uagagagcuggaaccaauuuaugcuccuucugacauucacagggaaugcuccguauaaaucuuggucucuucuuccuuuuua

SEQ ID NO: 4198819 - RNA, 60 nt, Human
uagagagucgggaacuuaccugaggccacaaagcaaacccagggccaauccugaccucua

SEQ ID NO: 4198820 - RNA, 97 nt, Human
uagagaguucagggaaagugucucagucuguuugggcuauuauaacccauaaaccauguggcuuacaaacaacagacauuuauuuuuaacuguucug

SEQ ID NO: 4198821 - RNA, 58 nt, Human
uagagauacagaugggcgaggccagcagcuuuugggcuuuucuccagcugugauuuua

SEQ ID NO: 4198822 - RNA, 75 nt, Human
uagagaugcugauuauuucuugcuagcucugugagagcaauuucaacaacuaucaagagguagcagugacugcua

SEQ ID NO: 4198823 - RNA, 84 nt, Human
uagagaugggaaagaauagagacuuuaucacucauguaaagcagugucgauguagguuucugauucuugcuaguauuauuucua

SEQ ID NO: 4198824 - RNA, 79 nt, Human
uagagauuuggcucugggauaucuuugucagcuuuuugaguuuuccagguaaaagguuuucuaggguugagggucuuug

SEQ ID NO: 4198825 - RNA, 60 nt, Human
uaccagccugacccugucugaccugggcuaggaaggaacagacauggguccagguuggug

SEQ ID NO: 4198826 - RNA, 79 nt, Human
uaccagcuagcuagguccugagcauccauucaaucgcuagugaugaagaguggcuguaucagucaacccuugcugugua

SEQ ID NO: 4198827 - RNA, 60 nt, Human
uaccagcuguuaggcuuggugcuguaaugcagaggcaguacugagagaggcuguugugua

SEQ ID NO: 4198828 - RNA, 71 nt, Human
uaccagcuuuugaugcuagaaaaccccaggugggaaauggcccucugaguagacuggacaugaagcuggug

SEQ ID NO: 4198829 - RNA, 71 nt, Human
uaccaggacauagcagugguuugguguccugcccauuuguguggcaggaaauucuuuuguuugugcuggug

SEQ ID NO: 4198830 - RNA, 81 nt, Human
uaccaggacucuguaaaacaauauuguauucucaaaagcaauaaaaauuauaagggguugcaaguuauuuauagccuggug

SEQ ID NO: 4198831 - RNA, 57 nt, Human
uaccaggauggaaacuugacuuuuagaaaaucauaagagcuauacauucaccuggua

SEQ ID NO: 4198832 - RNA, 71 nt, Human
uaccagggggaaauugcucuuaaagagaagcugcaaaaugucuauaggaaaacgugauuuucucacuggua

SEQ ID NO: 4198833 - RNA, 90 nt, Human
uaccagguaggaaggagaccacagcugugaugggaacauguugacucugucucaggauggagucuauccagugucccaaauuacuuggua

SEQ ID NO: 4198834 - RNA, 57 nt, Human
uaccagugucuugguggauuugaguaagggaccgucuacuaugcuaaggcauuggua

SEQ ID NO: 4198835 - RNA, 75 nt, Human
uaccauaaaaacuauaguuugcaaaagagcacuguauuuccagauguuuugugcacuucuauagcaguuuuggug

SEQ ID NO: 4198836 - RNA, 66 nt, Human
uaccauccaaacucucauuaucuguaccgaaaagauauggacacauguuuugaguuagggcuggua

SEQ ID NO: 4198837 - RNA, 80 nt, Human
uaccaucuaaccaaguucuggacaggggaauaugagcagaagucauguaaucaaauuccaggcuguguucuuagauggua

SEQ ID NO: 4198838 - RNA, 129 nt, Human
uaccaugaugaagggaggagcuugcaccagcagguguaaggagugugaguuugaguucugcucaucagacagccuaagcagucacauccuugaauccuggucuuuugcaggccaguccuuggucaggug

SEQ ID NO: 4198839 - RNA, 62 nt, Human
uaccauuuacuugaaaauaaaaugucuguguuuccuggcagacuauuuaaaguagaugagua

SEQ ID NO: 4198840 - RNA, 67 nt, Human
uacccaacucagacuggauuaaauaaaaggggauuuucuugcuuauuuaacucuagauucaguggua

SEQ ID NO: 4198841 - RNA, 60 nt, Human
uacccaggagaaacagcagggcaauaacaaaaauggccuuucucuuacuucuguugggua

SEQ ID NO: 4198842 - RNA, 67 nt, Human
uacccaguugaugaguauuuuauuuuagcagcccaaauggacuaagaugacuacuuaccacugagug

SEQ ID NO: 4198843 - RNA, 78 nt, Human
uaccccgcagggcgccugcuguggccaccgagguguugccuggagcggggcugacagcaggugugcuccuguggagug

SEQ ID NO: 4198844 - RNA, 99 nt, Human
uacccuacaaagguuucaccuuuggccacuucauagaucauuggcuaauguugagucaguugucuauccgugguucaauugguuauaaccggaggggua

SEQ ID NO: 4198845 - RNA, 60 nt, Human
uacccuuagcuggagugguggaaugacuuaucuagucuucuguuacuguuagcugaagua

SEQ ID NO: 4198846 - RNA, 69 nt, Human
uaccgggccaagacagaagugauuugaugugauccauauucacguuugcauagcugauguugucuggug

SEQ ID NO: 4198847 - RNA, 73 nt, Human
uaccguagugucagggagugauaaaugcuaugaagaaagaugaaguaauuucucaaaucucugagacuuggua

SEQ ID NO: 4198848 - RNA, 103 nt, Human
uaccuaggaaugcuuagccaugggucccuagaagccugguuuuucaaacauacaagugcuuaaaacagcacugagccgccauucagaggacagcauccaggug

SEQ ID NO: 4198849 - RNA, 72 nt, Human
uaccuaucugcuggauuuguuguuagggcugaaugaacuaaaaugcccucacacgguggccagcaguaggug

SEQ ID NO: 4198850 - RNA, 86 nt, Human
uaccuaugagagcacacagaaauauuuuagcugguauaugcaugauuuaaguaaaagaauguuaaauguguuugcucuucuaugug

SEQ ID NO: 4198851 - RNA, 72 nt, Human
uaccucaaagacaggcuggggcugcagccaagucaggcaaugagcuggcugggugccagucucccuggggug

SEQ ID NO: 4198852 - RNA, 59 nt, Human
uagaaagacuguccagauuucauuucuugaugaaacgaugcuuuggguaagucuuuuua

SEQ ID NO: 4198853 - RNA, 56 nt, Human
uagaaagcaguaucuccauuuuuugcuaauauagggcugaaaaauacugcuuucua

SEQ ID NO: 4198854 - RNA, 64 nt, Human
uagaacacauguauuuaaauguggcuuauuuuauuagcaguuacucuuagauacuagugugcua

SEQ ID NO: 4198855 - RNA, 59 nt, Human
uagaacuaaagaacaacuuugaaaaugugugauauuucaaaguguucagaccaguucug

SEQ ID NO: 4198856 - RNA, 106 nt, Human
uagaacugagagacaagucaaauuaggaacgcucaggaaaaccacuuuuacugucucuuggaagguccugggcgauuuucugaauaugaaucuguuaccaguuuua

SEQ ID NO: 4198857 - RNA, 58 nt, Human
uagaacugcucucauacuugcuguauguuguggaucagcaaguauagucagccuucua

SEQ ID NO: 4198858 - RNA, 105 nt, Human
uagaagaaguugacaguguugucggagcaggccagcuuccugacauccugauggagacaauaggaaugagagaguaggcuuuuccuacaauaugucaaccuugua

SEQ ID NO: 4198859 - RNA, 62 nt, Human
uagaagagacaagacuacauuuauauacuuaucaguguuuuauguaggguuugccuucucua

SEQ ID NO: 4198860 - RNA, 76 nt, Human
uagaagauucuaaaguggagaguagaagacgugaaaguaagacggauguucucuacauuuuugcuuuagagcucua

SEQ ID NO: 4198861 - RNA, 85 nt, Human
uagaagcggcacaggacauggaaguauggaguggacagguuaccauuuguacgcggugauuguauuuuuaaaugugcuguaacua

SEQ ID NO: 4198862 - RNA, 81 nt, Human
uagaaggagagaaacaagguguagguugaccaaacauuugccuggguguguuaucuuccuuguucucaaaugauccucaua

SEQ ID NO: 4198863 - RNA, 67 nt, Human
uagaaggcaggugguuggaguucuguugaaggucccaucuaugaauuccaggcuccugcaguuucua

SEQ ID NO: 4198864 - RNA, 60 nt, Human
uagaaggguuagagcaacucagucaaauuccaggugagcagcuuacauguggccuaucua

SEQ ID NO: 4198865 - RNA, 64 nt, Human
uagaaguuggacuuguugguacagucaugccucugaagggggcauuuggucaaggacaacucug

SEQ ID NO: 4198866 - RNA, 67 nt, Human
uagaaguuuuuggccuggauuuuaaucaacacaaccauuguuuucaagucaaggccaaauucuugug

SEQ ID NO: 4198867 - RNA, 64 nt, Human
uagaauacaguuuaagaacuacugcucugccaaaccagauuguugaguuuccugacuguaucug

SEQ ID NO: 4198868 - RNA, 76 nt, Human
uagaauaguguugaccacuuagaggggccacuuaaguauuugcugaaugaguggauucugaguagaaccuagccua

SEQ ID NO: 4198869 - RNA, 61 nt, Human
uagaaucaaagauguuucaggguguaucccacagggacaugcaucuuuagucuuaugucug

SEQ ID NO: 4198870 - RNA, 60 nt, Human
uagaaucauugagaauaacaggcuuguaugugucuggugauauuuucagugaucauucug

SEQ ID NO: 4198871 - RNA, 107 nt, Human
uagaauguugcagaggauuucuugcguguagcugaucugagauuuuccaaguuccaagaaggggucaagcggcagcuacaggacauuuuccaaaaugcaacaaccua

SEQ ID NO: 4198872 - RNA, 59 nt, Human
uagaauguuuuacagaucccauuaggcucuaaugauuaguggguuacauagaacaucua

SEQ ID NO: 4198873 - RNA, 96 nt, Human
uagacaaauccugaggaaggacuccaguuggccccaguugguucaugggcccaucccuguuuuaaucacuguggccagguggugugggguauucug

SEQ ID NO: 4198874 - RNA, 104 nt, Human
uagacagaagauggauugauagauuggaccuggagauguaaauaggauaguuuauuuaagcugcuuagagucucuucuuaucuauccaucuauuuaucuaucug

SEQ ID NO: 4198875 - RNA, 80 nt, Human
uagacagcacuagcuuuaagcauucugcuacuaaaauaucuauaguaucagaaggugucuagcuguguguuaccugucug

SEQ ID NO: 4198876 - RNA, 80 nt, Human
uagacagcacuguuccagaucaggacaccgucugggucuuaacugauagaacgccuugaucuuggagcgugcuccuucug

SEQ ID NO: 4198877 - RNA, 113 nt, Human
uagacagggcuccagcucccagcccagcgcucaggccucugcaucacacugguccccaggagaggagaugcuggccuggccaucuggggauggaagcaggagccucacgucug

SEQ ID NO: 4198878 - RNA, 57 nt, Human
uagacaugguuguacguuaucucacuacaucucgguacaugucuacagccaugucug

SEQ ID NO: 4198879 - RNA, 62 nt, Human
uagacauuuggaguuuuaugaccuaagaggaaagaaccuuuggaaugaaauuuuugugucug

SEQ ID NO: 4198880 - RNA, 73 nt, Human
uagacccaauuuccuggagcaggcaccagagugauccuggugcagccucucugcuucaggaacuugccaucua

SEQ ID NO: 4198881 - RNA, 84 nt, Human
uagaccguauaggguaacuuccuuggguugccauggcauuuauaaacugucauggugcuggugggaguguauuuuaaccggcua

SEQ ID NO: 4198882 - RNA, 68 nt, Human
uagaccugccuugauuguccugcuucugaugggauagacaaaagaaaucaggaacaguaaggagccua

SEQ ID NO: 4198883 - RNA, 73 nt, Human
uagacuaagguuacagagcuagucagugucagagcccggcuucaaacucaggacugccugucuccauagucua

SEQ ID NO: 4198884 - RNA, 87 nt, Human
uaaaacaaugccucuuggaagaagacuuaguucaagacaacaguagccacaacuuaucagaguuuauugucuuccaggcuuguuuua

SEQ ID NO: 4198885 - RNA, 81 nt, Human
uaaaacauuaguuacagaauguacagagguuuaugguuuauuucccagauagcuuguguuuuucuaaguaucugauuuuua

SEQ ID NO: 4198886 - RNA, 67 nt, Human
uaaaacucuaaauuacacaguguugugccaugaguuugguauuguaacaacaauaguuuagguuuua

SEQ ID NO: 4198887 - RNA, 78 nt, Human
uaaaacucuucagaacagcacagggugauuuggguauagcuaucuccagauaccuuggcccuuguucuuggaguuuua

SEQ ID NO: 4198888 - RNA, 72 nt, Human
uaaaagaauuuuaucuuauuacuugcaaggcaguagaaucugagugcuaaguagugauguagagauguuuua

SEQ ID NO: 4198889 - RNA, 56 nt, Human
uaaaagagaauggauaacagaguaacuuucugacuguguuauucagucucauuuua

SEQ ID NO: 4198890 - RNA, 55 nt, Human
uaaaagaugaugucuuggcccaagcaaugcaggguccagguuuagucauuuguua

SEQ ID NO: 4198891 - RNA, 69 nt, Human
uaaaagcucagugaguuuagucacuuuuuaucuuucccuuuaaaucugaaugauuguacugagcuuuua

SEQ ID NO: 4198892 - RNA, 73 nt, Human
uaaaaggccaguucugggccucaugcacagagaugcuaauuuaguaugucuagacccaagaauaugccuuuua

SEQ ID NO: 4198893 - RNA, 70 nt, Human
uaaaaggcugagagucacaguccuaauggucucaucuucugcccuaugacugucagaucuaggcccuuug

SEQ ID NO: 4198894 - RNA, 78 nt, Human
uaaaagucacaaauccugcagcuggagaggcgaugugagaaccugacuuuguacaggugcaggcauuugugagguuug

SEQ ID NO: 4198895 - RNA, 117 nt, Human
uaaaauaauaauaucuauuuuuuucaauauuaugaagauugugcuuggccuguaauaggugcucaaugauugguggcuauuaguacaauuauuuuuauuauugucauuauuguuuua

SEQ ID NO: 4198896 - RNA, 95 nt, Human
uaaaaugaauaugacauauuucuuucaagggcaugaauuauauucgguagacaaguuuccacauucaguuuuugaagggaaauucguucauuuua

SEQ ID NO: 4198897 - RNA, 119 nt, Human
uaaaaugagauaaagaaugaaauauguuugauaucauuauacagacguauacauaacucuguguguguguguguguguguguguguguguguguguauacucuuuuuuguuuuauuuua

SEQ ID NO: 4198898 - RNA, 130 nt, Human
uaaaaugaggccagaagaugggagauguaacaaguggcuuuggcccagacucggggacugaccuuggaggauccauccucagcucugaucuggauccucaagcuuuguuucuccuacuggcagccccagg

SEQ ID NO: 4198899 - RNA, 81 nt, Human
uaaaaugggcaugauaguggcauuuauggcacagcacuguggugcugcucaaugagaugccaucugacguauaacauuuug

SEQ ID NO: 4198900 - RNA, 80 nt, Human
uaaaauguagauucucggcccaugcucccugaaagugcugacacaguaagucugggcugggcuuaggaacccuuauuuua

SEQ ID NO: 4198901 - RNA, 75 nt, Human
uaaaauuuguucaacaggugaaauagaagauggugaaaaugucaaucuguuuugaaucuguugaauuuuguuuug

SEQ ID NO: 4198902 - RNA, 108 nt, Human
uaaacagaugacaaauggaaaauaguucaucacaaugaucaucggggaaagcauuuugaguagcuuaucauuugaacagaauuuguuuuucuaaccuguuucuguuug

SEQ ID NO: 4198903 - RNA, 61 nt, Human
uaaacagcuauuugaggacuggcuugaauauuuuuaaccaguuuaagcaaauaacugucua

SEQ ID NO: 4198904 - RNA, 71 nt, Human
uaaacagucgucuuaauaguauucagcuccaagaaagaaaagaugcaaggaauacgcugagaugaaguuug

SEQ ID NO: 4198905 - RNA, 84 nt, Human
uaaacagugguuaauaugcugcuucuugaaaagacauauuacaacuuacagucuuucuucauaaguguauguuguuacuguuua

SEQ ID NO: 4198906 - RNA, 83 nt, Human
uaaacaugccuugguuuuacuguauauauguauguguguauguauuuuuuauauaugacagaauguguguguauguguguuua

SEQ ID NO: 4198907 - RNA, 82 nt, Human
uaaacauggaacugcccagggccccauuccagaccaaccgaguuagaaucuccagggguggggcccaggcaucugauguuua

SEQ ID NO: 4198908 - RNA, 56 nt, Human
uaaacauuucaugcagaaggaaguuggggcaaaggcuccagaacuucaugaguuua

SEQ ID NO: 4198909 - RNA, 56 nt, Human
uaaaccucugugcuaugacacccucaguaccugggcuaggggugggcagagguuug

SEQ ID NO: 4198910 - RNA, 68 nt, Human
uaaacgaugauaaauuguucucugcuucacuaucaacauccaaguagcagaacaauagucaaugauua

SEQ ID NO: 4198911 - RNA, 57 nt, Human
uaaacguucgugcaacuaagcugagguuuuuuucagcugagaauaaggagccguuug

SEQ ID NO: 4198912 - RNA, 84 nt, Human
uaaacuaauuuuacugugcuuuacuguguugccuuuauuguuaaugaaugguaaagaaaagcacuguauuuaaaauuggcuuua

SEQ ID NO: 4198913 - RNA, 79 nt, Human
uaaacucuuccugaacuuuucugugaugcugacaguccgaugugguggggcugcagcuaugggaaauaggauggguuug

SEQ ID NO: 4198914 - RNA, 78 nt, Human
uaaacuggaauccuuaggaaagcauuguguaaaagcauggaugcauauauuuuuuguuauucuaugauaagcaguuua

SEQ ID NO: 4198915 - RNA, 79 nt, Human
uaaacuuuguaacucugaauacauccuacuugcaagucucuauguaauguaguauccggaguuugauagaauugguuug

SEQ ID NO: 4198916 - RNA, 128 nt, Human
uaaagaacaaaggaaaaccugaauaaaaggacaauggccuucaggcuuagugauaagaaaaauuaacagugaccugaaugucaauuuuuuggccuauuuguucuuugagguuuuuauuuuuuucuuug

SEQ ID NO: 4198917 - RNA, 63 nt, Human
uaaagaaucagguguuauuuuuugguugcacucucaaagccuagcacaguuccugacucuuug

SEQ ID NO: 4198918 - RNA, 97 nt, Human
uaaagaggcaguuaggaaucagagagagcaggaaaccuccggcaaggcugguucauuagugccucugcugauuaaucaagaccuggcugccacuuug

SEQ ID NO: 4198919 - RNA, 80 nt, Human
uaaagaucuccagauguaagaccuucaugagggcuuuuagaagaaagucccaguccccgucucuaugucugaguuccuug

SEQ ID NO: 4198920 - RNA, 55 nt, Human
uaaagcauguguuagaagugcagacauggguauucucuagcaaagaaaugcuuug

SEQ ID NO: 4198921 - RNA, 127 nt, Human
uaaagcuucgcuggugaaucuagaccauguuuugagccauuguuuuaauaaaagcacuagugcuuccuucaucuaaagcagugguucucaaacuugccuguucuucagaaucacuuggaaagcuuua

SEQ ID NO: 4198922 - RNA, 56 nt, Human
uaaaggagugggaacaaugacauggucaaagugagaccauucuuccuacucuucua

SEQ ID NO: 4198923 - RNA, 63 nt, Human
uaaaggcacaaaauccaaguagcaagcaugaaaugugguuugcauauuaaaucggugccuuua

SEQ ID NO: 4198924 - RNA, 57 nt, Human
uaaaggcacugcgucccucaaauucagaguuagagggugacauguaguugaucuuua

SEQ ID NO: 4198925 - RNA, 86 nt, Human
uaagcaauucuggauuguugaaggcuggcaauauauuuguuacaacauguaaugagugcaaaaguuacaaaccaaggauugucuua

SEQ ID NO: 4198926 - RNA, 111 nt, Human
uaagcauguuuucaagguccagcuauguuauagcauguaucaguauuucauuucuucuuauagcugaauaauauucuaugauauggauauaccauauugggcauuugcuug

SEQ ID NO: 4198927 - RNA, 75 nt, Human
uaagccaaaauaucacaguggcuaccucuggaugcagauuaaaaucuggaaauccacuugccacuguauaguuua

SEQ ID NO: 4198928 - RNA, 75 nt, Human
uaagccaauguacaaaauaauuacacaucugcuucuauaguaugcacagauguugcuguuguugucauugauuug

SEQ ID NO: 4198929 - RNA, 85 nt, Human
uaagccagucugaaauucagcauacauugcacccugguaguaucacuuugguuguauucccacaaugugugcuucaucuuacuua

SEQ ID NO: 4198930 - RNA, 124 nt, Human
uaagccccuuuuuauauggcagaggcaauuucauuuaaugauggcaaugauggauaguuacacauucacaauggauugcuucaauaccugcucauaauccuacaauauuaaaaagaaucccuua

SEQ ID NO: 4198931 - RNA, 65 nt, Human
uaagcggccacacaaacacagccaguuuccauuuagaagcagcugcaugucugugguggucuuua

SEQ ID NO: 4198932 - RNA, 65 nt, Human
uaagcuaacguccauggaaaugcaaaagacuguaccagcccauugcuuccuggaccuucaguuua

SEQ ID NO: 4198933 - RNA, 70 nt, Human
uaagcuuucagcagcagccuccugugcuacagcucacacagucaggcuguggcaggcagcuggaagcuug

SEQ ID NO: 4198934 - RNA, 82 nt, Human
uaagcuuuguuucuucaggcuuuuaggaggaacacuuaccuuaauccucuuaggucucugggccuugaagugauagcgcuug

SEQ ID NO: 4198935 - RNA, 104 nt, Human
uaaggaacuuggguaaaauguuccuaaugugcuuuucauagauaaaauucuauuauucaauaggaaguacugaaaggcguacuuaggauugcuuauuucucuua

SEQ ID NO: 4198936 - RNA, 56 nt, Human
uaaggaaggggaaagacaugucuuugacuaggaugauauguguuucaccauccuug

SEQ ID NO: 4198937 - RNA, 61 nt, Human
uaaggacaauuugucgcuugcagccacugccuuaucacuguaaguuggaagguuguuuuua

SEQ ID NO: 4198938 - RNA, 79 nt, Human
uaaggacucacucauugauuuauagaauguucaagccuccugguuuuaacuggacugaaguuuaucugaguaauucuua

SEQ ID NO: 4198939 - RNA, 63 nt, Human
uaaggaggcugcugugaagaaaggacaugcaauuccuccugccaucacacuguggcuucuuua

SEQ ID NO: 4198940 - RNA, 55 nt, Human
uaaggagggagagaggggaaugaacacccauaucucacucucuuuccacucuuug

SEQ ID NO: 4198941 - RNA, 93 nt, Human
uagacuauuuugauuggugugcuuuauucuuaccuauuucgguuuacaaaaauaugcaaauagguguaaugacaaccuucagaauguauucua

SEQ ID NO: 4198942 - RNA, 65 nt, Human
uagacucauagaauuggauagugcaagauaagucaaagacagaccgcuucccaauucuugaucug

SEQ ID NO: 4198943 - RNA, 59 nt, Human
uagacucugcauuuaccucccagguaauuuugaccaugggacaggagucagaggaucua

SEQ ID NO: 4198944 - RNA, 69 nt, Human
uagacugauuaaaaacagacauuuauuuucucacaguucuggaggcuggaagucugugaucacgugcua

SEQ ID NO: 4198945 - RNA, 81 nt, Human
uagacuguggaccucagagcuuggguuuucuuaauggaggaauuaucagggagaaaacuggagccugggguugcuaagcua

SEQ ID NO: 4198946 - RNA, 66 nt, Human
uagacuuaguacaacucacuugauuuuagccaaaaggcugagaagcaaugacuuaguacaacucua

SEQ ID NO: 4198947 - RNA, 117 nt, Human
uagacuuggccuuuaaaauguuuuuuaaauugaaugauuaaguggugaugaaccagaaaaaauaccuugaaauugaucccauuuauuaauuaguuugcacauguaaaggucuuucua

SEQ ID NO: 4198948 - RNA, 103 nt, Human
uagacuuuagacacugugccuugcauggaucaggagaugagaccauuaaauauugauuuccuaauuuaugcaggaguuuuucauacucuaaaaaaucaguuug

SEQ ID NO: 4198949 - RNA, 72 nt, Human
uagacuuuuagcauuguacauuugugcuucuauaggucacucauugaagcacauuguacauuugugcuucua

SEQ ID NO: 4198950 - RNA, 63 nt, Human
uagagacaucccaagaugacacaguggacgaccaaaugcucaccacuguuuucuggggcucua

SEQ ID NO: 4198951 - RNA, 85 nt, Human
uagagacugcuggugcacaguaccugcucucaagcaaacgccucucuuggcuuuacugagcauguacuaugugccaggggcuuua

SEQ ID NO: 4198952 - RNA, 69 nt, Human
uagagagacaccuacacacauacauauacacauguauuauguguauguauauaggugugugucucucua

SEQ ID NO: 4198953 - RNA, 64 nt, Human
uagagagauguaugcauuugucacaaaucagcuccugcauguguuagauuugugcauuucacug

SEQ ID NO: 4198954 - RNA, 97 nt, Human
uagagauugucuguucaccggggaaaggggcccagugacugacgauggaccagcuggaaugcagucagcuuggcuccucccaugaaccacagcucug

SEQ ID NO: 4198955 - RNA, 84 nt, Human
uagagcauaacgugucuguaaggaguccucaugucugugcgagcugggcuguguucuaggcugaggaguuugcgauguguucua

SEQ ID NO: 4198956 - RNA, 98 nt, Human
uagagcccccuggcugggugggucugggcaggcgcuuccucccggagcuggcugggcaccgcucccagacccaggcuuuucuaggucaggcaguucua

SEQ ID NO: 4198957 - RNA, 76 nt, Human
uagagcugaauguuuuucauuggugacucuucuuaccuaguguugucucugaaaaagauucagaauccuggcucua

SEQ ID NO: 4198958 - RNA, 80 nt, Human
uagaggagucuugaaaccagcgaggugaguccuccagcucuguucuucuucacggucaucuugcuguuuuagaucuucug

SEQ ID NO: 4198959 - RNA, 81 nt, Human
uagaggauauagagacaugcaguuguugugaauuacauaaccauuuccaaaaauucuaauaaagugauucuacuuccucua

SEQ ID NO: 4198960 - RNA, 97 nt, Human
uagaggauuaugauuuauucucaucaggaauuauccuaauuauuauggauuuuggcaguuugagguuuucugauguagaauaacaucaugucuuuua

SEQ ID NO: 4198961 - RNA, 56 nt, Human
uagaggcgggucuuuggaggugaugcggagggacggccccaggggacccagcccua

SEQ ID NO: 4198962 - RNA, 63 nt, Human
uagaggcuuacuuguaccgcaacgugacuguuauauuucuuuuguugcugaaggaagccucug

SEQ ID NO: 4198963 - RNA, 67 nt, Human
uagaggcuucaguuguaccuucuugcugugauacaaauugucugaauguaucgaauugaggcugcug

SEQ ID NO: 4198964 - RNA, 81 nt, Human
uagagggcagcccagagguuccaggcuagggaggaacucuuucugagcuuuggaaguuucaccagggccacaugcauuuua

SEQ ID NO: 4198965 - RNA, 73 nt, Human
uagaggggagcugcagaaggcacucacacuggcacggcucccaaugcuaguagcagugucuugcuccgcccug

SEQ ID NO: 4198966 - RNA, 68 nt, Human
uagagguaguaacauuuugccaucuggcaaagccacuagaccagauggauucauuaaugacuucucua

SEQ ID NO: 4198967 - RNA, 96 nt, Human
uagagguguauuucaggaaggauggcgagguggagagggagcuuuugucacucugucuaucccauucugugcauucuuggaauguuacauuuucug

SEQ ID NO: 4198968 - RNA, 103 nt, Human
uagagguuguauauaagauagauuagaguugacagugagugccaaaagauauaaauggcuuauaguggcaguucaggcugcaaucaugaugcuacaaucucua

SEQ ID NO: 4198969 - RNA, 68 nt, Human
uagaguaugcuagaagggagcacuauguuagaagggagcagaguuguuucugaauagcucauuuucug

SEQ ID NO: 4198970 - RNA, 64 nt, Human
uagagucagaaaguagugugccuauuuaaacacaaguuuucugggucuagugcuuuucacucua

SEQ ID NO: 4198971 - RNA, 55 nt, Human
uagaguguuguaauugaaaaggaugauuuucuggugguugaauuucagcacucug

SEQ ID NO: 4198972 - RNA, 75 nt, Human
uagaguuaaaccuggguuggagcccugcuucagucauuuacuagcaguguggccuuagacccggccucagcuuug

SEQ ID NO: 4198973 - RNA, 91 nt, Human
uagauaaagucuggauaguuugaguucaugaugacagugaaauuuuaauauaauuuauaucauugcaagcucauuuaucugcuugacucug

SEQ ID NO: 4198974 - RNA, 55 nt, Human
uagauaacagcacuggccucgcucaccaaagagaggagcuguguguuguuuucug

SEQ ID NO: 4198975 - RNA, 83 nt, Human
uagauaacugguaaauagugaaagaagagugaggagucaacagaugauucugcuucuuauuucacgugcuuuagugguauuua

SEQ ID NO: 4198976 - RNA, 68 nt, Human
uagauaacuugcaccuacaggauguaccaagagccucucacauuacucuguaaguguugguuauucua

SEQ ID NO: 4198977 - RNA, 114 nt, Human
uagauaauugauugguucauccucuucccucuggcugguguugcauuuugguuguaaauaugcacgaagugugugcaugugaaugugggacuggagggaaaccaugaguaucua

SEQ ID NO: 4198978 - RNA, 58 nt, Human
uagauacaggcaagauuaugaaccaaaauuaauguuauuaauauuuugcuuguauuua

SEQ ID NO: 4198979 - RNA, 69 nt, Human
uagauacuuacuuuucuucagacuacaaucuagaauuuguugguagaaagacaaagugcacagugucug

SEQ ID NO: 4198980 - RNA, 105 nt, Human
uagauauggcuaaggaagucucuagacagaauauuguaagugccacuuagcuucuucuaacuguguaugauauguacugggagagaugagcuuuaggcagagcua

SEQ ID NO: 4198981 - RNA, 70 nt, Human
uagaucaggcugcuuagauagaaucaaauauuguuuaacauuuugcaaguuaucuagcuagucugagaua

SEQ ID NO: 4198982 - RNA, 56 nt, Human
uagaucauauuuguggagaaaacuaaaagacguuuuagcuaauagaugcuggucua

SEQ ID NO: 4198983 - RNA, 75 nt, Human
uagaucaucuuucuuauuuucugagaauuugauacaguugucaggagcucagcuaaguuggagagagcugaacug

SEQ ID NO: 4198984 - RNA, 55 nt, Human
uagaucauggguacugcauaugauggaagaaauuucuuaauguucccauguucua

SEQ ID NO: 4198985 - RNA, 57 nt, Human
uagaucuaaugcaguuuauguaaacguaaguuacugugguuacugcuauuagauuua

SEQ ID NO: 4198986 - RNA, 76 nt, Human
uagaucuagucucucuggguccuggcaagcucacagauagaugugggccuauauauggcugagagagccugauuua

SEQ ID NO: 4198987 - RNA, 58 nt, Human
uagaugaaauuuguguguaugcaugugugugugcgugcauauguauaugauuucucug

SEQ ID NO: 4198988 - RNA, 63 nt, Human
uagaugagugggagcugcuaccuccuuccaugcccaugggcagggguagcauuccaaguacug

SEQ ID NO: 4198989 - RNA, 71 nt, Human
uagaugauaccucagcugggcuuuaggagcuacagaagaagcugcaucuccaugagcucagcguguuucua

SEQ ID NO: 4198990 - RNA, 70 nt, Human
uagaugcuuguucagaaauagguacaucuguguuuacuguagugaacacauauuucugggcaaccauuua

SEQ ID NO: 4198991 - RNA, 61 nt, Human
uagauggggaggagguuauagcugcuuucacaguaagaucuauuaauuuuucuucccacua

SEQ ID NO: 4198992 - RNA, 79 nt, Human
uagaugugagaauucuuaguacauagaugaugguugaauuucagaaaaugaaaaguuagccuguguguauuaacaucua

SEQ ID NO: 4198993 - RNA, 61 nt, Human
uagauugagcuugacaguguuguccuaaagauucuaagggaaaauucuguaguuuaauuug

SEQ ID NO: 4198994 - RNA, 83 nt, Human
uagauuguuacuucguuucuucacaagcauagacuucuuugucugcugcuucuguugaagcacauaaauccaaguggcagcug

SEQ ID NO: 4198995 - RNA, 72 nt, Human
uagauuuaaggaaaguuuauagguuauauaauuggauccaaauauuauauuauguggauguuccuaaauuug

SEQ ID NO: 4198996 - RNA, 90 nt, Human
uagauuuaauuugagagcaaauguuugcuuaaggaggaaguuacaggaaaguuuucggaagucagauaggugaguccaaauuaaagucug

SEQ ID NO: 4198997 - RNA, 66 nt, Human
uagauuucagccccgcucccagcugucugagucacaucccgcaccucggggcaggcauggacccug

SEQ ID NO: 4198998 - RNA, 130 nt, Human
uagauuucuagucccuuagucucuuugugggucaauguaacugugcuuaugccugauguuaaucacauuccuuucuugagcacaguuacacauuuuguugauagcaaggagaagaggaaugagggaauga

SEQ ID NO: 4198999 - RNA, 98 nt, Human
guguguguguguguguguguuaugacagaucuuguacucauuauugaauaauucauuguugcguuaaugucuucagauaccaucucucacuuccucac

SEQ ID NO: 4199000 - RNA, 85 nt, Human
guguguuaccaccuuuaauuuacaauguuaauuggguuauuaauuuccuaaaucuacuuuuguagauaaagaugugcuaacauac

SEQ ID NO: 4199001 - RNA, 102 nt, Human
guguguucuuugugguuggggccaaaauuugaauaagccuugccaaaucacuuuaaaguuuagcuugaaucuuguuuaaauuccuuaucacucagauuuaac

SEQ ID NO: 4199002 - RNA, 81 nt, Human
guguguugagugaauaagaccuaaggaugaaucaucaucugugauaucaucaaaaggguauuauuggagcugcagcaacac

SEQ ID NO: 4199003 - RNA, 72 nt, Human
guguguugguuugucagccucuugcuuaucaccuucuggucacaagauggcugcugcagcccccaacaucac

SEQ ID NO: 4199004 - RNA, 62 nt, Human
guguguuguuuaagcugcuguuuguggucauuuguuagagcagcaauaauaaaguaauacac

SEQ ID NO: 4199005 - RNA, 82 nt, Human
guguguuuggacgacggauucuggguggacuuuuggaccaacuaaaagacccucuagagucccagugaucugcagagcacac

SEQ ID NO: 4199006 - RNA, 60 nt, Human
guguuaacugagaaauacccaagucugguaguucuaccaaucugguauauuccagaauac

SEQ ID NO: 4199007 - RNA, 80 nt, Human
guguuaaggggaugccuaguggagucuccacgcuggacaaaaaggcuucugagauucuuaugggcauugucccauagcac

SEQ ID NO: 4199008 - RNA, 87 nt, Human
guguuacgucuuccuucucuuguccuuuuguucugucaugcuuagacuaggcagugagcuggagggaaggaacugacuaguuugcau

SEQ ID NO: 4199009 - RNA, 128 nt, Human
guguuaggacagucaauucuuuaucuaauguugaguaugaauugcuuugccuguaucuucccaugaacucuauagcaaaauaguuuccacacuuucagaggugaacuugaauuuacuuagccucccac

SEQ ID NO: 4199010 - RNA, 63 nt, Human
guguuagucugagacuuuuucugugugggagagauuguauccuacacacagucuagaagacau

SEQ ID NO: 4199011 - RNA, 75 nt, Human
guguuagugucaccagcuugucugcacugggcaugggacauggggugcaugcagauugggaaaguuaauuggcac

SEQ ID NO: 4199012 - RNA, 82 nt, Human
guguuauuucacaaaacggacugaagaucuugaauuuacugacaucauaaauacaauuucaggcuguaauuuugaauggcau

SEQ ID NO: 4199013 - RNA, 56 nt, Human
guguucagccagcaucagcuaagugccuagcauugugccagaugcuggcagaagau

SEQ ID NO: 4199014 - RNA, 72 nt, Human
guguucagcccuuuccaauuugauuuauuaaaaguuuccuuucauaauccaagaggggaagaguggaauuac

SEQ ID NO: 4199015 - RNA, 65 nt, Human
guguucagugguaucucauugugguuuugcuuuccauuuccaugauggcugaugauauugaacau

SEQ ID NO: 4199016 - RNA, 84 nt, Human
guguucaguuaauuugggaaaugcugagguaaaucagauuaaaaggcuuuuuacccuggguauuucccaaacuuuucugaucac

SEQ ID NO: 4199017 - RNA, 60 nt, Human
guguucauggaugucaauuugagauucugagauauucagucacucugacuugaugaauau

SEQ ID NO: 4199018 - RNA, 87 nt, Human
guguucauuaagaaaauaguuaugcucuagacaagaaugcuuccagauuucuuacuguuuaaguaugacuagcucaugauuuucuac

SEQ ID NO: 4199019 - RNA, 128 nt, Human
guguuccagccucuccugcgccuccagauacggcugcuuccugggucugggugucugaggggacgucccucaagguucccacccagcucagccugucaggagccgcacccugcgaggccugagaccac

SEQ ID NO: 4199020 - RNA, 72 nt, Human
guguucccaccuaggaguguuaggaaguuguguuuguguuucaagcagaaaaacugagcuccaagugagcac

SEQ ID NO: 4199021 - RNA, 83 nt, Human
guguucccauucugaguuuuucaaaucugaauuugcuuuugucagcggcuuacagauaaugaggagacuccuguggcggaugc

SEQ ID NO: 4199022 - RNA, 78 nt, Human
guguuccuguaccaaaguugaguggaccagcccuguggcacaugccuggcaaggcugcccacuucaaaagagcagcac

SEQ ID NO: 4199023 - RNA, 79 nt, Human
guguucguguaugucugauaaaagugaccuuuagccacuuuuaugugguuuauguuuuucagacguccuacacagagac

SEQ ID NO: 4199024 - RNA, 80 nt, Human
guguucuauugauucagccaucuccaugcugagcacagaacuuugcccagaauagaugggcugugucaaucaaagcccac

SEQ ID NO: 4199025 - RNA, 58 nt, Human
guguucugcagaccagcaucaucaguaucaccugggagcuuguucaaaugcagaauac

SEQ ID NO: 4199026 - RNA, 89 nt, Human
guguucugugaagcgucuauuucuuugaaucuuuucguacagucaaaaugagaauguccagaggugagucagagcuucucaaaggacau

SEQ ID NO: 4199027 - RNA, 57 nt, Human
guguucugugcaucagaguugagcuggcuucgcuaucugcaucugagcacaaaacac

SEQ ID NO: 4199028 - RNA, 101 nt, Human
uaggaggauuagguuaaaacuuguuuuggaacagagugaauggagaaauguacaaucuauugauuuagcucaagacacauguuuuaaagaaauugggacug

SEQ ID NO: 4199029 - RNA, 56 nt, Human
uaggagguggaaguuguggagcaguguuucugcuguccauaagagaccaucuccua

SEQ ID NO: 4199030 - RNA, 67 nt, Human
uaggagguuugucuuuuuuguguugguucaaaagaguucuuuauauauuagggagauuagcccucua

SEQ ID NO: 4199031 - RNA, 78 nt, Human
uaggagucgcugcuuucuguuaggaauugggggcagggggaguuuccuuccaauuaacggaguggcggcgaccuuuua

SEQ ID NO: 4199032 - RNA, 55 nt, Human
uaggaguucuuucccaucgaggggaugcaacuuccuagcagggagaggauaccug

SEQ ID NO: 4199033 - RNA, 122 nt, Human
uaggaguuggguagcuaagagggcuuuguguuuugucucuggguuccuacugcuuugaaguuaaaauggaaauuuggcaagugggaaauuaguaaagugcucuaaaugcuuuuggcaucuug

SEQ ID NO: 4199034 - RNA, 80 nt, Human
uaggaucagggacuggccaggguuuggaauagauacacaugauauaauuauucuauugugaauucauucccuuuuuucua

SEQ ID NO: 4199035 - RNA, 81 nt, Human
uaggauuggguugccaagaagguggggacaugcagacaccaaaaugugcugcgucucucucugucucucuguauccuccua

SEQ ID NO: 4199036 - RNA, 69 nt, Human
uaggauuucaugaggcauuuugcauuuaaguagaucuuacuucuuugaaauguuucuugauuaauccua

SEQ ID NO: 4199037 - RNA, 65 nt, Human
uaggcaacaugucgaauacugucuuuauuuaaaaaaaauuaauugggcgugguggcaugugccug

SEQ ID NO: 4199038 - RNA, 59 nt, Human
uaggcaccaccuagggugacccagccccagccuagguggccccacccuggguaguccug

SEQ ID NO: 4199039 - RNA, 108 nt, Human
uaggcagacuucuugccccuccuuggggagacccugagguuuucuguacuagacagaguuuguuagugcagcugagccccauggcugcccacagcgguaaccugcuua

SEQ ID NO: 4199040 - RNA, 101 nt, Human
uaggcagugugaaauagcagacagaacaggcuguggaucaggagccuugggccccaacuuuccaacuucaccccagcuucaucccuaugucauccugaaug

SEQ ID NO: 4199041 - RNA, 57 nt, Human
uaggcaucacuccaucuuucuuccuuccugaggaccaaaaugugagcgugaugcuua

SEQ ID NO: 4199042 - RNA, 80 nt, Human
uaggccccagucucaguucacguugguaaagugagacccauucugccacguuucccugaggcucuuugcuugggcgccug

SEQ ID NO: 4199043 - RNA, 63 nt, Human
uaggccccuagugccacguggcaggcugugacgccagagccacacguggccaccaguggcuua

SEQ ID NO: 4199044 - RNA, 98 nt, Human
uaggcuggaaugaagccagaaggccuggggcacuauggggggcugaggcuggaguuagcccuccaggccccuggccuucugcgccugcguuuccccua

SEQ ID NO: 4199045 - RNA, 72 nt, Human
uaggcugggggauucgcuggugcugggacucucauccuacaacuuggauuccaguuaaugguucccagucug

SEQ ID NO: 4199046 - RNA, 73 nt, Human
uaggcuguauuuuagauauguuuuugcuaaugcagucaucacacugcaugguaacuauuuguuuaaaagucug

SEQ ID NO: 4199047 - RNA, 73 nt, Human
uagggaagggaaguagcaucugagcuucaaucuguacaugcacuaugaccuuugacgcuauuuaauuugccua

SEQ ID NO: 4199048 - RNA, 70 nt, Human
uagggaccaaaagguggggcagcuccaggcccaggcuguagucuuggcuccuguugucaucagcucccua

SEQ ID NO: 4199049 - RNA, 93 nt, Human
uagggagaagagaaauaugacaaaaaugcuaacuguguugaaucuagaugaugaacacauggguguuuauuguacuauaucuguuuuucucua

SEQ ID NO: 4199050 - RNA, 64 nt, Human
uagggaugacgaaaggacagagaacaccaccaguuuucuccaaaaaacccuuuucucaucucua

SEQ ID NO: 4199051 - RNA, 73 nt, Human
uagggauguggccuucggucuuuccucgcagcuccggggcaagcuaggagugggauggaagucgaggucccua

SEQ ID NO: 4199052 - RNA, 74 nt, Human
uagggcacuguaguuaggaaaacaucuuggccucugaguucaagacgauugccagguuccugagucaugccuua

SEQ ID NO: 4199053 - RNA, 81 nt, Human
uagggccacugaggggucauggugggagucaaggaaaucaauauccaaacuucucucccaccauucucccuuagucuccug

SEQ ID NO: 4199054 - RNA, 97 nt, Human
uagggccgcuguguuguauaauuccaggguucacugauuacguagaauauaacaugaauggcacccaguggagcugugcuccaacacaguggcccug

SEQ ID NO: 4199055 - RNA, 75 nt, Human
uagggccugggcaucuggauuuuuaaaacuccccagguugcuaauguguagccagagauugagaugcaggcccua

SEQ ID NO: 4199056 - RNA, 63 nt, Human
uagggcugauucacauuaggaagagaugaagugguuauaacuucacaaucaaaaucaguucug

SEQ ID NO: 4199057 - RNA, 59 nt, Human
uagggcugucagacugaggaggcccaaaagcuuuugagguuuccuccagauaagcccug

SEQ ID NO: 4199058 - RNA, 82 nt, Human
uaggggaauuugucguuggugaaaaaauguagcugaagauuuucaguuaacaaguuggcaaucaacuuuaagaaagccucua

SEQ ID NO: 4199059 - RNA, 93 nt, Human
uaggggagcagcaguggcugcaggucccaccugucugggucucaguguaagcccaccucccgugguggccuggggccucugccugagccucua

SEQ ID NO: 4199060 - RNA, 98 nt, Human
uaggggcgguauuuggggggcugaggagagcuuuuuuggucuacauuguggagcagaaauggccucuugucacagcccuuaguacucaagagccuuua

SEQ ID NO: 4199061 - RNA, 58 nt, Human
uaggggcugagggagaacagccagcaagaaauugaggcccuuagccuuauagccucua

SEQ ID NO: 4199062 - RNA, 63 nt, Human
uagggguggagcuaagagucccaaaucuaauccugccuuggucuuucugguaaccagccccua

SEQ ID NO: 4199063 - RNA, 79 nt, Human
uagggguggagcuaggauaagcagagacuggguuauaacccuuucagcccaaauauucuaucucucuaaguagccccug

SEQ ID NO: 4199064 - RNA, 92 nt, Human
uagggguugguaaacuauggcuucugggccaaauuuagcuugcugccuauuuuuauauggccuaugagcuaagaaugguuuucacauccuua

SEQ ID NO: 4199065 - RNA, 63 nt, Human
uagguaaacuucccuaugaggacucugcuguuacauuuuccuccucuguaguuaaguuuccua

SEQ ID NO: 4199066 - RNA, 109 nt, Human
uagguaauauauaaauguaagauuuuguacauuauuucaucagucaucugggcccaaggcuagauaucuggaaaaaauguauggauggacuuaauuuuauugauacuua

SEQ ID NO: 4199067 - RNA, 79 nt, Human
uagguagaagaucucaagucacacagccaggcauaauguugccaauuauaagcccugugaacuuaagauuccuuaucug

SEQ ID NO: 4199068 - RNA, 81 nt, Human
uagguauuuucacaguuucugaacacuuugcaaguuggacaauaaaacuaauuuuuaauaugaaagaaauuguuuagccua

SEQ ID NO: 4199069 - RNA, 93 nt, Human
uagguccccauacauuuucuaugacauugguugugugccaucuggcucaugacuuuccagcaauuucauggauaaaagauguauaauaaucug

SEQ ID NO: 4199070 - RNA, 62 nt, Human
uaggucuguguucuuuagagguuuuuguugguaggaacauugaaccaguagacacaaaccua

SEQ ID NO: 4199071 - RNA, 56 nt, Human
guuaagagacaaaaggaaaucuggagagaucuagauccauuuucugucucuggaac

SEQ ID NO: 4199072 - RNA, 66 nt, Human
guuaagccuaauggggccauuuaguucauuuucaagaaugcuuaaaaggcugcguuagaaaauaac

SEQ ID NO: 4199073 - RNA, 74 nt, Human
guuaagcuaaagugaaguucagaauggcuuguuaacuggguuuauuagcuguugaccuucccuuucagcauaau

SEQ ID NO: 4199074 - RNA, 61 nt, Human
guuaaggaacuaguacucaggcucucauccaaguggcugagggacuugcuaguucucugac

SEQ ID NO: 4199075 - RNA, 59 nt, Human
guuaaguaaacuaugauuuauccgucuaauggaacacugugaaucauaguuugcuuuac

SEQ ID NO: 4199076 - RNA, 66 nt, Human
guuaagucauagucuaacccagccaggaguguguucagccuggaaaaagguggacggugacugcac

SEQ ID NO: 4199077 - RNA, 67 nt, Human
guuaaguuccacagugagauaaaagcaaguaugacuaagcuugagucuuuuauccugggaauguaau

SEQ ID NO: 4199078 - RNA, 95 nt, Human
guuaaguugcucaauugauuuuucacugauagaaagaauauagauuccacccaugggucuuaguuuuuuucucucuugaaagagagagacuuaau

SEQ ID NO: 4199079 - RNA, 112 nt, Human
guuaaguugcuugaaaaaaaauacuauaaaacucugugacaaaaacacugauuauuucuaaaaggucaauugaaauggacugauuaugcuuugucauuaaguggcccuuaac

SEQ ID NO: 4199080 - RNA, 121 nt, Human
guuaauacaaacagaaaagcauacagcagcccuugcuuugcacacuucugauacaaaugaguuucaguuaacacagcacugugcaaagcaaaggcugccuguauucaauucucaaaggagc

SEQ ID NO: 4199081 - RNA, 77 nt, Human
guuaauauauguaaaugcaucagugcuuagagcagugccuggcacauaguaaguucugaguaaauacuguuauuaau

SEQ ID NO: 4199082 - RNA, 78 nt, Human
guuaaugcagacaccgacacucagauuaaugaaaggaagcaauuuauugaacugauauuugguguagaugucauuagc

SEQ ID NO: 4199083 - RNA, 75 nt, Human
guuaauguuuguaagaaggugaaacugauuaucuugacuuacauagucaguuucuaaaucuuaccaauucuuagc

SEQ ID NO: 4199084 - RNA, 92 nt, Human
uaucuacugccagaaaacucacaacacuuaugaaauguagguugcuuuauucaagcacuugauuacauuagugccugccugguccaaagaua

SEQ ID NO: 4199085 - RNA, 59 nt, Human
uaucuauaaguacuaacaugguauuugucacugaaaaucuauguguguguguguaggua

SEQ ID NO: 4199086 - RNA, 77 nt, Human
uaucuccacaaaggaacugcauuuugaaguuggaguaagccacucugacauuuaaaaagcaauucaguggaaaggua

SEQ ID NO: 4199087 - RNA, 56 nt, Human
uaucuccaucuggagagcaaaauaaucacuuauaauucugcauuaagguggagaua

SEQ ID NO: 4199088 - RNA, 106 nt, Human
uaucuccccuggaacacagaguauuugaagcauuugaagaauuuuuuucagguuauguuuaaaauuaaaaccaacucauguugugaaaaacucaagggcacggaua

SEQ ID NO: 4199089 - RNA, 103 nt, Human
uaucucuauguacauuaagagaaacaggaauugagucgcuugcugaaaacuucuaaaaaguccaugacaagacuucagaucuuguucuuuuguguaaaagaug

SEQ ID NO: 4199090 - RNA, 86 nt, Human
uaucugaacuguuguaaagacacugguuuuaaucauuucucagaucuauugaaauauugaugcucuuggugcuuuuaagguagaua

SEQ ID NO: 4199091 - RNA, 64 nt, Human
uaucugcuguugaugaacauuggaagaaaagcuacaucuuuucauguacauucggcaacagaua

SEQ ID NO: 4199092 - RNA, 98 nt, Human
uaucuggcaagauuccugacaauuuagcaauugauucucauaagccgguucuaucuggcucuaagaaaucauugcuuauagguacucuagucaaggua

SEQ ID NO: 4199093 - RNA, 62 nt, Human
uaucuggcuccuacacuugaagaggcaauauuccuccacucuaauuauccuagggccaggua

SEQ ID NO: 4199094 - RNA, 71 nt, Human
uaucuuacuuauuagcauaaguguucggugcacuuuuuguugcuguggaaauuuauguuaguuguagggua

SEQ ID NO: 4199095 - RNA, 79 nt, Human
uaucuuagagcaguucacagccauguucaugugcaaggccuuccugcacugguacguagguuggggcauggaugagaug

SEQ ID NO: 4199096 - RNA, 56 nt, Human
uaucuucaggcccccuguuguuagcacuacauuuuggcagcacuaccugaagcaua

SEQ ID NO: 4199097 - RNA, 66 nt, Human
uaucuucuagagggguagacauauuauuugggauacuucuccagucucaucuuucccugggagaug

SEQ ID NO: 4199098 - RNA, 126 nt, Human
uaucuucugaggucacccugagugaggcuuugcuccuacccagcucuccaggggugaaugaccacgcccaagggguguugauggaggaaaagauugaggucacaugagggagguuucagcaggaug

SEQ ID NO: 4199099 - RNA, 67 nt, Human
uaucuuuaggaaguuucagauaggaauguuaagguauuauuucucauuuguaauuuacuagcagaua

SEQ ID NO: 4199100 - RNA, 90 nt, Human
uaucuuucuuucacuuauuucuugaguagcauuuauggaaagccagcggcgguguuggaugguguuuucagggugggagugacauggaug

SEQ ID NO: 4199101 - RNA, 86 nt, Human
uaucuuuguguagguacauggggugugugcacgucuaucuccacauguauauaugugugugcacaucugugugugccuugaaggua

SEQ ID NO: 4199102 - RNA, 95 nt, Human
uaucuuuuauucauguuuagcuuucagaauccacugaguguuuuaaaugguaaugaaaaggcucaaagguugauagcugugcuuggagagggaua

SEQ ID NO: 4199103 - RNA, 72 nt, Human
uaugaaaggguaucucauugugauuuuaauuuacauuuuaaaauuauuaguuaaguugggcaucuuuucaug

SEQ ID NO: 4199104 - RNA, 79 nt, Human
uaugaagaaauacccagcguuagugagacagaaggcaaaaggcauguuuguacacaaccugugguaguauauuuuggua

SEQ ID NO: 4199105 - RNA, 65 nt, Human
uaugacaccauuuuggucagugauggacugcauauaugacaguggucauuauuaaaauuguuaua

SEQ ID NO: 4199106 - RNA, 72 nt, Human
uaugacacgcuuagcagagugaccugcgaccaguggggggucaggacauaaggucauuguuaagucaccaua

SEQ ID NO: 4199107 - RNA, 56 nt, Human
uaugacagucggcucuugcaagcugguacaagccagcucuagcaacccacugcaug

SEQ ID NO: 4199108 - RNA, 70 nt, Human
uaugacauuucucugauuuguggccaauuacggagguuauaaaauggcuguuaaucagggaaaugccaua

SEQ ID NO: 4199109 - RNA, 67 nt, Human
uaugacuuuguaaaguuggguucuucuuugaguucagauagucgaaggaaccucaauuuucgucaua

SEQ ID NO: 4199110 - RNA, 70 nt, Human
uaugagaauuugcuaauuggcuguuguuaaaauuaugacacuuaucaccuaaucaguaaauguucuuaug

SEQ ID NO: 4199111 - RNA, 69 nt, Human
uaugagagggccaguaaauguuuccucaggacacuucuuagaggacaaagucugugccugucccucaug

SEQ ID NO: 4199112 - RNA, 69 nt, Human
uaugagauguuguaaagaguuccaugucuaauagauggaugauaucuaaauucguuugcaacacugaua

SEQ ID NO: 4199113 - RNA, 57 nt, Human
uaugagcaagaguuugugaagggagauagaaaguccugacuacaacuguuguuuaua

SEQ ID NO: 4199114 - RNA, 74 nt, Human
uaugaguacugugaacgagaauuaguuacuuaaccucucugagcuucuauacucucauuuauaaagugcugaua

SEQ ID NO: 4199115 - RNA, 68 nt, Human
uaugagugggggcaggcagugcuaggaagagccauugccuuuuagauugugaccuccccccauccaug

SEQ ID NO: 4199116 - RNA, 57 nt, Human
uaugagugugugugaugugugugaaauucucuccuuacccaguuccacacacugaug

SEQ ID NO: 4199117 - RNA, 68 nt, Human
uaugaguucauaaugacacugaaggaaaaacuaauuggucaccauuuggaggucauuaggacauuaua

SEQ ID NO: 4199118 - RNA, 70 nt, Human
uaugaguugcucaggcuuagagcuacuauaugacagaguuaagugagagaucugucugaagcaucucaug

SEQ ID NO: 4199119 - RNA, 62 nt, Human
uaugauagugagggaagucauagucaucugaagugaugucuagcacaucaucucacugcaua

SEQ ID NO: 4199120 - RNA, 76 nt, Human
uaugaucuaauugugugaugaggcuacugagaaaucuaaugcaaucuuaugcuucauuaauagaauuaguauugug

SEQ ID NO: 4199121 - RNA, 87 nt, Human
uaugaugcccuggucuugccaaguucagggagcugggugccaagucuaucagcauuccucuggggccaggccaacaaagguagcgua

SEQ ID NO: 4199122 - RNA, 130 nt, Human
uaugauuauuuuucucgauaaauuauuuuugcucuccaagagugauucuaguuagggaauaugacaucaauucccagaguaggcauuaacucaugguagauuggaaggcugaagaucauaauauuucaua

SEQ ID NO: 4199123 - RNA, 56 nt, Human
uaugauuuuacccacagcagcauuccauggagggcagcuacugugggaaaauugug

SEQ ID NO: 4199124 - RNA, 63 nt, Human
uaugcaaaucauuagauuuccugcauuuagcuggcaggaaauauugucuaaauggagugugua

SEQ ID NO: 4199125 - RNA, 58 nt, Human
uaugcaaugcgcugacaugcagguugauugaaaggcuucauucacaggguauuguaua

SEQ ID NO: 4199126 - RNA, 59 nt, Human
uaugcagcaccacucacugcagaagacuugucucuucccgaagugaguggugcugcaug

SEQ ID NO: 4199127 - RNA, 79 nt, Human
uaugcauagcuucuccuauaaagugugguuuccguggcaacagcaagggggaaacaggugugcggaaagcugugauaua

SEQ ID NO: 4199128 - RNA, 98 nt, Human
uaugcaugauguggucugcacuugcacacauguacauguguaugguguguuauuuuacugugugugugugugugugugugugugugugugugugugug

SEQ ID NO: 4199129 - RNA, 60 nt, Human
uaugcauuaucgucuugauccucuauauaaaacuguacaggcauaaugaugauaaugaua

SEQ ID NO: 4199130 - RNA, 59 nt, Human
uaugcauugugagacugugggaauggccucuucagucuccccaggaucuccagugcaua

SEQ ID NO: 4199131 - RNA, 81 nt, Human
uaugccagauugauuuuggucuuuuguaaguuaucucaggauuuguaggaaguuacagguagaccacaguuauaagguaug

SEQ ID NO: 4199132 - RNA, 61 nt, Human
uaugccaggaccauagguuuuaacaacuguauaguuagaaccugaacuagggucuugcaua

SEQ ID NO: 4199133 - RNA, 100 nt, Human
uaugccaguacagcuuucauuaaaaauuccaaaucucaggggcuucaggagcuuaaaguauuuaaauuucaauagaaaguugguacugaaguuaagcgua

SEQ ID NO: 4199134 - RNA, 59 nt, Human
uaugcccuuacaaugagcacaagcccauauugcuaaauuguguaucauuuuaagggaua

SEQ ID NO: 4199135 - RNA, 130 nt, Human
uaugccuuuuauuuuaaauucugaauuuaaauuuuauauugggagucguuuugauucuugaaaaaugcguuuugagcugauuagagcuucccaauuaaaacgguacaacugaauauauuauaugggcaug

SEQ ID NO: 4199136 - RNA, 62 nt, Human
uaugcgcacaagcacgagcagcgugcgugcgugcgugcacgaugcgugugugugugugugug

SEQ ID NO: 4199137 - RNA, 80 nt, Human
uaugcugacugguaauggcuguguauauacggauucuguagacaaaugaaaguauauguauagccagucuuuaggguaua

SEQ ID NO: 4199138 - RNA, 84 nt, Human
uaugcuguuuaaccagaaagguacucaucccaauaaaauccaguaauuagggcaguacguuuucuuaguuauaaaaucaguaua

SEQ ID NO: 4199139 - RNA, 59 nt, Human
uauggagaagauagugggagaacagauguccuuucauucucugagcugcuucuugcaua

SEQ ID NO: 4199140 - RNA, 70 nt, Human
uauggaugccugggccuccuuccaagaaauucucacccuguuugacuggaauggggcccggacauugaua

SEQ ID NO: 4199141 - RNA, 71 nt, Human
uauggcaccaaggcauucuugcagguagggaacaaaaaguuuaccaccucauuauuccuggcuuguucaua

SEQ ID NO: 4199142 - RNA, 128 nt, Human
uauggcauagggacuacguuccaggagccaguguuccaagaggaccagaaagaaguuguauaacccuuuauguacaaguuuuggaagucuuaaggagucacuuucuuggcaguuacagcccugccaua

SEQ ID NO: 4199143 - RNA, 71 nt, Human
uauggcauucuguuuaauacacgaaagguuuccacuugauauacauuguguuaaaacagaagauagccaua

SEQ ID NO: 4199144 - RNA, 63 nt, Human
uauggcauuuagaaaugucagaccaagguuuuaaaggcccuuugaacauuucuagauuacaua

SEQ ID NO: 4199145 - RNA, 74 nt, Human
uaguuuuuugguagcuauuaacuuugccccacuagacacaaauaagcagaguuccagcugugaccagaaaauug

SEQ ID NO: 4199146 - RNA, 72 nt, Human
uauaaaaauggguauguuauuauuguuauaguuacaggaacuauuuagcaaguaugauacuccaugaguaua

SEQ ID NO: 4199147 - RNA, 55 nt, Human
uauaaagagucucaaagaaguuggcuggauaaagccugcuguggaagucuuuaua

SEQ ID NO: 4199148 - RNA, 109 nt, Human
uauaaaguagcuuguaaagacaaguaauuggacccagaagguggccucugucacaaucuaagcaagugauggccuggcugguucaguacccuuugcacccugcuuuuua

SEQ ID NO: 4199149 - RNA, 89 nt, Human
uauaacucuucuauagaaauggcucuguuggcccaagaccucggaugccaguuuucagccaggagcacauuuuugcagggaggguuaua

SEQ ID NO: 4199150 - RNA, 81 nt, Human
uauaagcccuggccuauuuaguuaucuuucauaaaauaaaauguaauaacuuauuucaagaucuuuggguaggcuuuugua

SEQ ID NO: 4199151 - RNA, 93 nt, Human
uauaagguagucuugauauuuuugaaggcugaaagagugaaaaaaacauaugccauuagcuagaaauaagauuaacucaagacugcacuugug

SEQ ID NO: 4199152 - RNA, 101 nt, Human
uauaagucuugcauggacauguacuucaauuucucuugaguaaauaccaaguaauaaaaugaggauauguuuaacuauguaaaaacucugucagauuugua

SEQ ID NO: 4199153 - RNA, 63 nt, Human
uauaagugugucagcuuccaacuuuacugauuacagcaguuugucuaugcugaugcauuugug

SEQ ID NO: 4199154 - RNA, 96 nt, Human
uauaaguuuguaauugaaugagaaguuauugccauguaauugacuaacagguguauguuaugguaaugaguuugaaucauauucaguugaauuaua

SEQ ID NO: 4199155 - RNA, 69 nt, Human
uauaaucugugugugugugugugcaggaaggaaaauggcuuugcacacauuaaggauacacagaaugug

SEQ ID NO: 4199156 - RNA, 87 nt, Human
uauaaugaccuuuaauuuauuuggaaacaucucagaaaauauaaaguuuuguauaaggaguuuaccagaguucugaagauuauuaug

SEQ ID NO: 4199157 - RNA, 117 nt, Human
uauaauguuuuaagaggguuuacgaauuuguguuaguccacguucaaagauguccugggccauaugcggcccaugagcagugggcuggacaaacuugcuuucugcuucugcguuaua

SEQ ID NO: 4199158 - RNA, 55 nt, Human
uauaauuaguaaauggcagauuugggacuuaaaccaugccauuugacugaaugua

SEQ ID NO: 4199159 - RNA, 70 nt, Human
uauaauuuugcaguaaauuuuauuugugggugauggaacuguuucuuucagagaaaauuugcugauuaua

SEQ ID NO: 4199160 - RNA, 68 nt, Human
uauacaagaggugagaugagcaggggacugccuuucccauccugucuaucagccucccuucuugagua

SEQ ID NO: 4199161 - RNA, 87 nt, Human
uauacaagugucuguuuguaucccugcuuucaauucuuucggguguaccccugggauugaauugggggaucacauaggcauucuaua

SEQ ID NO: 4199162 - RNA, 66 nt, Human
uauacauauauauguguguguauauauguguaucucuguguguguaaacauauguauguauguaug

SEQ ID NO: 4199163 - RNA, 88 nt, Human
uauaccuagcuagcugcucaaguauauggacccacaagaaucugaugaguccaccuuaguauaugggagucucuggcuuuaggguaug

SEQ ID NO: 4199164 - RNA, 93 nt, Human
uauaccucauuuacuuuucacuucacauuagcuaaaagggaaacuaggaaauuuucuuuguagcuaaugugaagugaaaguaaaugagguaua

SEQ ID NO: 4199165 - RNA, 74 nt, Human
uauaccugcucccaagucuucacucagguucugcucuugggagagaggaaacccaaacuaagacaguagguaua

SEQ ID NO: 4199166 - RNA, 67 nt, Human
uauacucacaaacauugccauguagucagaaguuggagaacagcuguuguuacaaugcaagaguaug

SEQ ID NO: 4199167 - RNA, 55 nt, Human
uauacugaucacugaggucaucuuuuccucucaugugaccacagugcuuaauaug

SEQ ID NO: 4199168 - RNA, 55 nt, Human
uauacugucgcauuacacucacaugaaugugugaaagggaauugaagacagugug

SEQ ID NO: 4199169 - RNA, 78 nt, Human
uauacuugugugccuguguguguccguguguacacaugugugcgccgacacagccagguguuggccaaugcaggugug

SEQ ID NO: 4199170 - RNA, 87 nt, Human
uauagauagacaaaaaugacagaggauuguaaagaggccccaugguuuugggagcuauucccuggcaaucccuuguguuugauuaua

SEQ ID NO: 4199171 - RNA, 61 nt, Human
uauagcaugcaucggugcuucauccuuuuuauggcugaauaacaguccaugcauggcuaua

SEQ ID NO: 4199172 - RNA, 57 nt, Human
uauagccaucuaaaggacaaucacuccagacaagugcuguccaacagacuggccaug

SEQ ID NO: 4199173 - RNA, 94 nt, Human
uauagcuggucucugguauaagcuuucaguaaauuauaauuuggccacaugccaaauuguggcgucuguaagaguuuacugugaggccucuaua

SEQ ID NO: 4199174 - RNA, 94 nt, Human
uauagggccgggugcaguggcucaugccuguaaucccagcacuuugggaggccaaggcauguugggagcaggccccccaaaaucuggccauaug

SEQ ID NO: 4199175 - RNA, 87 nt, Human
uauagucacuggaagacacuguaacucuguaauagugauuucaucaccauuauugcugacuuguucaguguuauuaugagugcuaua

SEQ ID NO: 4199176 - RNA, 77 nt, Human
uauagugauuagaaaucaugucuuauuucuaucaacccauaacaagauggagucauguaagaguuuaaauuacuaug

SEQ ID NO: 4199177 - RNA, 79 nt, Human
uauauaucuguccauuuuccauuuuggcaaaagauacauggaguauuugguaggccaggaaagugggucuuaguauaug

SEQ ID NO: 4199178 - RNA, 89 nt, Human
uauauauguguguguguaguuuguguguauauguauauagaugcacauaugaauauacauauauacauacauacacacacauauacaua

SEQ ID NO: 4199179 - RNA, 115 nt, Human
uauauauuaaguuggugcaaacguaauugcaguuuuugccauuaagaguaauggcaaaaccggauuacucuuaauggcaacaacugcaauuacguuugcaccaaccuaauauaua

SEQ ID NO: 4199180 - RNA, 103 nt, Human
uauaucuccauaaguugaacugaaaaauaccucuguaaguaaagauucaacccaaggguuaguuuuuacugcgaguuauaaacuucaagaaacuggguaugua

SEQ ID NO: 4199181 - RNA, 83 nt, Human
uauaugacgcaugaccuuuacacaaugauuuucuuuauccuacuguaaaucuuagucuugguagguggcuugggugucaagua

SEQ ID NO: 4199182 - RNA, 55 nt, Human
uauauguaagcuauguaagaguugaauuuaguugcucuugauugguuaacauaug

SEQ ID NO: 4199183 - RNA, 97 nt, Human
uauauguaguucuuaguuacauccaaaguugaggugccugcaguauuuucauaagaaggcggaucugacuuucagauugguggugaggacacgugua

SEQ ID NO: 4199184 - RNA, 77 nt, Human
uauauguauauuaucuuauguugucgccaaguguuucaccugccuugucucuccagcaauaagaagggauacaugug

SEQ ID NO: 4199185 - RNA, 103 nt, Human
uauauguguauguauauagauagauauguagauaucucauuaugaucaauuuaaaggacauaaucagauguguacauaagagcauuuguuacauucauaugua

SEQ ID NO: 4199186 - RNA, 88 nt, Human
uauauguuuagguuuggggggaaaaggguugucuuucuuagaaacacaauaaauuuauccuuugaaucccuccugaaucaaccauaug

SEQ ID NO: 4199187 - RNA, 72 nt, Human
uauauguuuugugcuucauugguagagcaguugcaacagagauuguauggccugcaaagccuaaaauauaua

SEQ ID NO: 4199188 - RNA, 64 nt, Human
uauauuaugcauggucugaagucaaccucuaaagagagguugucuaauugagcguuguaguaug

SEQ ID NO: 4199189 - RNA, 86 nt, Human
uauauucaaauagaugacaggauauuaugauagauucuuucuauaaagcaguuuggcaguuuguuuuuaaaaacuauaugaaugua

SEQ ID NO: 4199190 - RNA, 61 nt, Human
uauauucucaugcugccuauaucuguuugggaacuggagagaaggcagucauuggaauaua

SEQ ID NO: 4199191 - RNA, 84 nt, Human
uauauucugcauuccacauaaagcgauaacaggaaaacauaaaauuccacuaacuucauuauuauuuguguguguguaggugug

SEQ ID NO: 4199192 - RNA, 64 nt, Human
uauauugcuucccacaaagauguauugacucuggaaacagcauggguuaguggaaagcagucua

SEQ ID NO: 4199193 - RNA, 70 nt, Human
uauauuggcgcacugccucuguuguuuuccuuuucgcagaauacaauuagugaucagugaugccuuuaua

SEQ ID NO: 4199194 - RNA, 109 nt, Human
uauauugucaaccaaccacagcuagacuaauugcugggaaucucaagauaaauuuuauaaaaugucucuacccacaagugguuuacugucuguuaaggaagauagagua

SEQ ID NO: 4199195 - RNA, 79 nt, Human
uauauuguucugccucuuaaguggauggaguggauucauaauccuuagcuccagcuauugagugggcaagggacuggug

SEQ ID NO: 4199196 - RNA, 94 nt, Human
uauauuucuaucucuauauguuacucuuucaagcagagauaaucuguucauaguaguguauauguagagaggacaaggacuuuauagacauaua

SEQ ID NO: 4199197 - RNA, 92 nt, Human
uauauuuuaguuuugaaaaugaugcuguaauuuggcagguuuauaacuuaccacuaauugaagcaauauuuaucaacugcacgugaaauaua

SEQ ID NO: 4199198 - RNA, 92 nt, Human
uaucaaauguguuuuauauguauauucuuccugaaguaagaaaaaguucuggaauuuugagucagagaaugugaauauuaaaccaucauuua

SEQ ID NO: 4199199 - RNA, 104 nt, Human
uaucaaauuuuucuuucaagaaccuggaaagcgguucauuuuguuuuaucgagcagauugugaaaagaguuuucuugcagaguuuuuguuuuauaaucaaaaua

SEQ ID NO: 4199200 - RNA, 130 nt, Human
uaucaaggcucucuuuuuugcucagcaguaaucugauucucuagcugugauaaacugcucugccuuuggccuucuaguuuagccauuuaggaauuggauuauugucucauaaaacagaggggcaaugaua

SEQ ID NO: 4199201 - RNA, 56 nt, Human
uaucaaugguuuauauucaagggaggaacaaguuuuuucuuggagaacuaaugaua

SEQ ID NO: 4199202 - RNA, 60 nt, Human
uaucaauugggccaaaugguacaaaggaucauguaacuagaggaguggcccaggauggug

SEQ ID NO: 4199203 - RNA, 56 nt, Human
uaucacauacuucucauccaggcuguucuuugggucgugggggcucaguugugaua

SEQ ID NO: 4199204 - RNA, 60 nt, Human
uaucacugaguuuugacaacuuuuauauaauugacuguaaaguguuuugauuuaguggua

SEQ ID NO: 4199205 - RNA, 84 nt, Human
uaucacuugaccuucccauuucugagaagugccuggucugccguguauagcaaacugcacuuacauagaggaggcuagguggua

SEQ ID NO: 4199206 - RNA, 58 nt, Human
uaucagaacacagccacagccauuuuuuuacauauugccuauggcugcuuucaugaua

SEQ ID NO: 4199207 - RNA, 61 nt, Human
uaucagagaugcacauuugguuuaugacacccaugucaguguaaauggugcauuucuuaua

SEQ ID NO: 4199208 - RNA, 130 nt, Human
uaucagcgguccuuagacaucugcguauaucaaaaucaccuggagaacuugguaaagcuggggcuucuaggagcuuuauuaacucuccaggugauucucguaaacaucauaguugagaacugcuucucua

SEQ ID NO: 4199209 - RNA, 61 nt, Human
guuaauguuuucucacagggagagucccuaauguuucuacuuuuugugcagcaacauuaau

SEQ ID NO: 4199210 - RNA, 70 nt, Human
guuaauucagucaaagaaaccauuugaucugaaugugugaccgaaugaccagugguuugacugaauucac

SEQ ID NO: 4199211 - RNA, 74 nt, Human
guuaauuccucugagcucuaucugugggaaugaugaauucuagccauuauggaguucugugagguuaaauuaau

SEQ ID NO: 4199212 - RNA, 58 nt, Human
guuacaaaggaagcuucacugcaugcauucuuuugcccaguggggaucucuuuguagc

SEQ ID NO: 4199213 - RNA, 90 nt, Human
guuacaauaaucacuggaaaaaguucaauggaaaagcuuuaguuccuuugaaucuguaguuuuucuugagcuaaucagucauuugauaac

SEQ ID NO: 4199214 - RNA, 57 nt, Human
guuacacacaauauauccuaaauucacuugguaguugggguaacuauguguguuagc

SEQ ID NO: 4199215 - RNA, 66 nt, Human
guuacacagcuaagcuucuccuggguagaacaaacuauuugcggaaauuugguuuaguuuuguaau

SEQ ID NO: 4199216 - RNA, 68 nt, Human
guuggagucccagccgcagagagcagggcaucacggccaccugcucuagacucugggaagguucuagc

SEQ ID NO: 4199217 - RNA, 68 nt, Human
guuggauggcaucguccugggcauagggagggaugaguucuccugccaggagaugguagccauccugc

SEQ ID NO: 4199218 - RNA, 105 nt, Human
guuggauuuaucaaccucuuaccaugauuuaaaauacuguguuaaguuuggguuuuaaucuaacugaaacguauuuuugagauuggugugagguugaaaucuaau

SEQ ID NO: 4199219 - RNA, 79 nt, Human
guuggcacugcaggcagacuuccugcuuggaucucuccuaucuggagggaugagauggggacucugucacaugcacaau

SEQ ID NO: 4199220 - RNA, 81 nt, Human
guuggcagagccagaggucucucuauacugggaauaagcaaugagcuggaaguuccauuaggggaucuggcucuugaggac

SEQ ID NO: 4199221 - RNA, 109 nt, Human
guuggccaggcuggucuugaacuccugaccucgugaucuguccaccucggccuuccaaagugcugggauuacaggcaugagucacugugccaggccacaccuggcuaau

SEQ ID NO: 4199222 - RNA, 62 nt, Human
guuggccccugagcuucauucugugugauccauacacagcagagacacucaggaggcaaugc

SEQ ID NO: 4199223 - RNA, 58 nt, Human
guuggccuugaggugguagaguucaucgaacuucaugcugauauccucgauggacagc

SEQ ID NO: 4199224 - RNA, 65 nt, Human
guuggcugagggcaaugacauggcccaguuuuccuuacuauuuacuucuuuggccuucagccaac

SEQ ID NO: 4199225 - RNA, 69 nt, Human
guugggaugucugggucuuccuggcuucaccugugacuagggaagcucagaguagcucagcguccucac

SEQ ID NO: 4199226 - RNA, 70 nt, Human
uauuuugcguugagucagauuucccucguguuaagacagucuccugggaaugucuaaaaaauguaaaaua

SEQ ID NO: 4199227 - RNA, 55 nt, Human
uauuuugcuuuggcccuuaagugguagccuacugucuggguucccaagcaacaug

SEQ ID NO: 4199228 - RNA, 56 nt, Human
uauuuuggcucucagcaguuagcuuuucuggagcggaauagcugagggcaagagua

SEQ ID NO: 4199229 - RNA, 80 nt, Human
uauuuuuaagugcauuuuuccucugguaaguuaugaugaauuauaugcucuguaaagaagagaaaugcauaguagauuug

SEQ ID NO: 4199230 - RNA, 84 nt, Human
uauuuuuaauuuuaguacauuuaguuuaugaacaugcaauuuguggaugucuguggcauuauauguuuuauaaaauugaaagug

SEQ ID NO: 4199231 - RNA, 105 nt, Human
uauuuuuauuuuugcuuuucuccuuaaauauuaguuugaccucuggauugcaaugcaaugcacauguuguaauaaauaaaaggggcuuggauaaaagugaaaaua

SEQ ID NO: 4199232 - RNA, 61 nt, Human
uauuuuucauuugcggcauggaguucaagcuccuagaucagagaugcugcuaauuaaaaua

SEQ ID NO: 4199233 - RNA, 74 nt, Human
uauuuuucugaagagagggaaacaauuggaauugaagugacuaauuccuuuugcaagguccucuaggaaaaaua

SEQ ID NO: 4199234 - RNA, 73 nt, Human
uauuuuuuaguguggggcgguaguuugaugauuaaacuguaucugaacuuuacacugcuuuacaugaaauuua

SEQ ID NO: 4199235 - RNA, 77 nt, Human
uauuuuuuaugcuuuaauuguuagaaucuaguuuaucagggcugauaccagggcugacaguaaaaguaugagagaua

SEQ ID NO: 4199236 - RNA, 97 nt, Human
uauuuuuuccuugaccauguagaaacagacaucuuuuccucacuaaaaacuuaaaaaaggaaacauuguaauuuuagcauggauuaaagaaaauaua

SEQ ID NO: 4199237 - RNA, 65 nt, Human
uauuuuuugaacauuuucuauguuauagauauauuuguggaugcugagaauguucaugguaaaua

SEQ ID NO: 4199238 - RNA, 78 nt, Human
uauuuuuugcuucccauauaacuaauuucugacauauaagauuuauguagacauuauugggugggacuucuaggaaug

SEQ ID NO: 4199239 - RNA, 63 nt, Human
ucaaaagcuguuguucauccugaauugaauuuucuuaguuuggguggaacagagucguuuuga

SEQ ID NO: 4199240 - RNA, 90 nt, Human
ucaaaaggcgcacacagggcacaagcaggcagcaaccucuaugagucagagccugcuuggccuacuuguccuuugcaccaugucuuuuga

SEQ ID NO: 4199241 - RNA, 60 nt, Human
ucaaaauuuuauuccuguauguuuuacacucaguuugagcuuuaagggauaaaaugauga

SEQ ID NO: 4199242 - RNA, 59 nt, Human
ucaaacagcucguggcugcccuugugcccagcgcugugggcaugagcgagcugcuuuga

SEQ ID NO: 4199243 - RNA, 57 nt, Human
ucaaacauugcacuuucugcuauguugagaagugacauaaguugugcaacuguuuga

SEQ ID NO: 4199244 - RNA, 56 nt, Human
ucaaaccuuguuccagucaacucugugcgugaguagggagggggaauuagguuugg

SEQ ID NO: 4199245 - RNA, 56 nt, Human
ucaaacucauucuaaguauaccaaagccaagauuauuggcuuuggggaugauuuga

SEQ ID NO: 4199246 - RNA, 110 nt, Human
ucaaagaacuggugaaaugacuccuaaguaaguugacuuucagagaauuggcugcuucucaugagggaaaaucaauuucugcuucuuguugucaucuguuuacaauuuga

SEQ ID NO: 4199247 - RNA, 69 nt, Human
ucaaagacauucacaaauguucacuuuuguuggauugcugagugagcauauuugugugauguuaaagga

SEQ ID NO: 4199248 - RNA, 66 nt, Human
ucaaagagaaguuuuucuuauuacauguaauacauaguucaugacggacaaagacuucucuuguga

SEQ ID NO: 4199249 - RNA, 88 nt, Human
ucaaagagccuggaccugggcucugagcccuguacaaggaugagaagcagaggcagcacuucagguuuuuguccagguuugaucauga

SEQ ID NO: 4199250 - RNA, 76 nt, Human
ucaaagaguugaggcaguuauccaggaggucugaaaucacagaagguguuuggagagcgugcuuagcacucuguga

SEQ ID NO: 4199251 - RNA, 58 nt, Human
ucaaagcauuugguucugaagacucugaggugcagagcucuuuugaugaagguaguga

SEQ ID NO: 4199252 - RNA, 55 nt, Human
ucaaaggaaacgugguccuggcccucgagggggugccaguccaaauuccuuauga

SEQ ID NO: 4199253 - RNA, 66 nt, Human
ucaaaggaagaacaaagcucagccagaugcccaaaauauggcuucauuauuguuuuuccuccauga

SEQ ID NO: 4199254 - RNA, 72 nt, Human
ucaaaggggccaccuguggcacccugggucugcaccacucaguucccccagaggugcccaggggccccagga

SEQ ID NO: 4199255 - RNA, 65 nt, Human
ucaaaguaccuucauauuauucaaaguuucgcauagauggugcaauauuaugaaagguaaaauga

SEQ ID NO: 4199256 - RNA, 62 nt, Human
ucaaaguagaguucagugcagccagugcaggugugaaugcucaaaacuggauacuacugugg

SEQ ID NO: 4199257 - RNA, 65 nt, Human
ucaaagugcucuagaaauugucagugguuuacaugaaguggccacgggugucuggagcacccuga

SEQ ID NO: 4199258 - RNA, 64 nt, Human
ucaaagugucuuuauauuugagaaaagucugcauuuguauuucucuuaaauagagccacuuaga

SEQ ID NO: 4199259 - RNA, 77 nt, Human
ucaaaguuccuuccuguuucuccugcaaaauccuugcaugugugcuggggguguguguggaggacaugagccuuuga

SEQ ID NO: 4199260 - RNA, 130 nt, Human
ucaaauccacuggggcaagccugcauacucagucucuaucuuggugauucacaagugguuaaggcuuugagaaaccuggcaguagagaccuguggccuugugcacucuggcauucucuacaucuguuuga

SEQ ID NO: 4199261 - RNA, 113 nt, Human
ucaaaugagcacaauaguccacuguaucuuuuccaaagucuaaauaacucagucuucauuagcacaauguugaggauaccaagugugaugguuaauuuuaugugucaguuuga

SEQ ID NO: 4199262 - RNA, 55 nt, Human
ucaaaugcaggucuggucuugguagaggugucccuccuccccuaccuccguuuga

SEQ ID NO: 4199263 - RNA, 85 nt, Human
ucaaaugguagugcaauguugcagaagcacauguuuacauguaaagauuauuuauacacaaggugugcauuuguaaacuauguga

SEQ ID NO: 4199264 - RNA, 66 nt, Human
ucaaauugaaauucuuugugguccaucacuguuaacacugcuggccuggaaggaauuucagugaga

SEQ ID NO: 4199265 - RNA, 65 nt, Human
ucaaauuuaagugaggucuuuguuaaguucuguaaauugagcuuauaaagacaaacacuauuugg

SEQ ID NO: 4199266 - RNA, 129 nt, Human
ucaaauuugaaugucuugcuuccccuucccuccuugguuccuggccccauccaucuucagagccaacuguuugaagacggaaggggccaggaaccaaggaagaggggaaaagaagacauucaaauuugg

SEQ ID NO: 4199267 - RNA, 65 nt, Human
ucaacaagccagauacuuggaaagacccugagggauuaggguucaaacugaaucugguuugaaga

SEQ ID NO: 4199268 - RNA, 78 nt, Human
ucaacaagccauaaggccucuucucucuggagauucucacugugguuuccagacuggaaggucugaguggucugagga

SEQ ID NO: 4199269 - RNA, 69 nt, Human
ucaacagcauggaguccuccagguuggugcaucucuaaacuugacccaccuggagauccauggugucga

SEQ ID NO: 4199270 - RNA, 119 nt, Human
ucaacauccuccuucuuuugagugcccauguuucccagaucuuggccuuggcucuucucacucaacacacaacucuucaucugaacacacuacuccauuuaccaucuccuggauguugg

SEQ ID NO: 4199271 - RNA, 76 nt, Human
ucaacauguggagaaauuucaaaagugagccauaaaacucauacaaaagguuauacaguuaaguuucuucaguuga

SEQ ID NO: 4199272 - RNA, 87 nt, Human
ucaaccaaugagaacugggaguugguggccaaauaccaagcuuccucaacccuugguaagucaagucucagucucucagagguuuga

SEQ ID NO: 4199273 - RNA, 71 nt, Human
ucaaccauuauuuucugagcacgugacagcauuggacucagugcugcauuggcuguagagaauaaugauga

SEQ ID NO: 4199274 - RNA, 92 nt, Human
ucaaccugaggauauaggagucauuuuaugggaacagauuugaaggcuuaucacuguuucccaaaguaagagguaccugugaccuguguuga

SEQ ID NO: 4199275 - RNA, 59 nt, Human
ucaaccuguggaagaugggaguggguggauccauacccagcuuucucacacuuggugga

SEQ ID NO: 4199276 - RNA, 77 nt, Human
ucaacuauugcuuuccagugggccccuugaaauaauuucugcacaugcacagguuggggggucagccaacuaguuga

SEQ ID NO: 4199277 - RNA, 57 nt, Human
ucaacucacaagaaugagcaaguucuuuggacuuaaguuguugacauucugaguuga

SEQ ID NO: 4199278 - RNA, 128 nt, Human
ucaacuccauucuauggauagaaaagcaguuucugagagguuaagcaauuugaccaaggucacaagguuaguugcuggcagacccuaggaguaggaaagcuagaguguuguguguggggaggaguagg

SEQ ID NO: 4199279 - RNA, 78 nt, Human
ucaacucuuucuucauacaauuucagacaucucucuauggauaagaagaugucagaacagguaugaaguuagggagga

SEQ ID NO: 4199280 - RNA, 87 nt, Human
ucaacugcuucugcaccugugcagguuuacaaaaaauuuuugccaaauugaauggaagauuugaaacacauagacagagguaguuga

SEQ ID NO: 4199281 - RNA, 76 nt, Human
ucaacugguuuuccagcuaguaagcaccugcauccugagagaacaggcuaagaugagacugugcugugagcguuga

SEQ ID NO: 4199282 - RNA, 78 nt, Human
ucaagaaaaugacgccaaccuuccccaggugcuccucaaucacuguguugucugucagagggauggucuuauucuuga

SEQ ID NO: 4199283 - RNA, 103 nt, Human
ucaagaacuaaucacacuucauucuguauuuuuuauucuucuuauggucaacacguaugaagcaguuaaggugcaugauaaucgaagugcuguuugugguuga

SEQ ID NO: 4199284 - RNA, 75 nt, Human
ucaagaaggguuuauuguuaauaaguuugaaaccacauuucaaauugucaucuugauaauguuagccuuuuuuga

SEQ ID NO: 4199285 - RNA, 96 nt, Human
ucaagaaguauauuauguccuccaguguguucucaaugaaaagaaaauuauuucuuucuuggggaacacacucuuauggcauuuuaacuuuuauga

SEQ ID NO: 4199286 - RNA, 87 nt, Human
ucaagaagucccagaagucacagagagaauauuguguuucagaaauuggguugaaauauugcuuauuggauagaggggauuauuuga

SEQ ID NO: 4199287 - RNA, 101 nt, Human
ucaagaauaauagaaaaugacuauaaauaggagauuguauaauauaguauaauagucuuuugagcaguuaccuauuuuguagaaauuuuuuaaggucuugg

SEQ ID NO: 4199288 - RNA, 65 nt, Human
ucaagaaugguuagaugucuggaaauuaagcucauaauuaucagauauaaaacugcaaaucuuga

SEQ ID NO: 4199289 - RNA, 56 nt, Human
ucaagccacuggcagaagauuacuuucuaagagugagagccuucccagggcuucga

SEQ ID NO: 4199290 - RNA, 69 nt, Human
ucaagccccuccuggaggcggaugcccaccuacguuucagcgugggaagccgaccccggggggaccuga

SEQ ID NO: 4199291 - RNA, 57 nt, Human
ucaagcccucuggguuaguuuagggagccacaguuugguacccagaguugggcuuga

SEQ ID NO: 4199292 - RNA, 65 nt, Human
ucaagccuugguagggucuggagucagacucagccaccacugaccuagccccuacuccaaguuga

SEQ ID NO: 4199293 - RNA, 58 nt, Human
ucaagcuacaggacaccucugcucaguuuugugcaagaggggagcaucugcuggcuga

SEQ ID NO: 4199294 - RNA, 78 nt, Human
ucaagcuuucacguaagucauuuaagguaagcucucugagcagcuuugaagucugugucuuuugaaugcaaagcuuga

SEQ ID NO: 4199295 - RNA, 103 nt, Human
ucaaggagcaugaacgguggcuggccaugugcauccaggcccugcagcgggaaguggcagaggaggaccuggugcagguggacagagccguggacgcccucga

SEQ ID NO: 4199296 - RNA, 95 nt, Human
ucaaggauacuugaguagaacugguuaucuaauauuauacauuuuauauauuggguaaagauccaguuuucauucaagcacauauauuuccuuga

SEQ ID NO: 4199297 - RNA, 97 nt, Human
ucaaggcuacuccuggugagagaauuugaguuaaauuuaggccauauacuuuguuuauauuuggcuaauuucucacucucuugaucacaagcuauga

SEQ ID NO: 4199298 - RNA, 116 nt, Human
ucaaggcugccaaaagaauuuacuguuuguuccagcccacaccugaagcuggagccccugcuucccagccucugugugaggguaggagccuaacguuaacucauguccagcuuugg

SEQ ID NO: 4199299 - RNA, 64 nt, Human
ucaaggcuuugugcugaguugucguuugaaccaagcaugauguuaucaagcacaaagcacgugg

SEQ ID NO: 4199300 - RNA, 105 nt, Human
ucaaggugaagaguggggaguugggagcagggauggaguacccaggauaaaucugagaaacagguuacugcaucgaaaugcuuuuauccuuccucaucccuaugg

SEQ ID NO: 4199301 - RNA, 55 nt, Human
ucaagucuugagggacagcauuccagcaccacugagugucauucccaagcuguga

SEQ ID NO: 4199302 - RNA, 64 nt, Human
ucaagugaucaaagugcuggaauuacaggcgugagccacugugcuggccuuuggugacuucuga

SEQ ID NO: 4199303 - RNA, 64 nt, Human
ucaagugcagaguuucucaguggaauuuucaagaagauuuacaaaggauuugcuuuucacuuga

SEQ ID NO: 4199304 - RNA, 62 nt, Human
ucaaguggaggcaguuuaagucugagaaaaauuauucuuucugaagaugcuguuuccaguga

SEQ ID NO: 4199305 - RNA, 77 nt, Human
ucaagugucaaucagcugugguaauuuggaaccauaguucauacauuuuuacuaacagcugaggauuugauauuugg

SEQ ID NO: 4199306 - RNA, 70 nt, Human
ucaaguuaggcgcagcacgugagaguuggcaguuuuccacccaccgaccugaguugcugugguuagauga

SEQ ID NO: 4199307 - RNA, 58 nt, Human
ucaaguuaggugguuguuaggaguaaaugaguuaaugccugcaaagugcuuagcuugg

SEQ ID NO: 4199308 - RNA, 57 nt, Human
ucaaguuucucucagauuauggggucauuuuagagacccaauuuaccaaagacuuga

SEQ ID NO: 4199309 - RNA, 109 nt, Human
ucaaucugggaagcucauacugguguacaaugcagcaguuuacaaagcaaucccaaugggguuguguacuagcugcuuguuuguuugcaagugcaauuccagauguuga

SEQ ID NO: 4199310 - RNA, 103 nt, Human
ucaaugaaaucagagauuuuuguuuguuuacugauauauugucagucccugccauacagucacuuaaaaauguguugaauaaauugugccucgauuuuguuga

SEQ ID NO: 4199311 - RNA, 56 nt, Human
ucaaugccuagagaggcugggugacuuccaaggucacacagcuggucagguacaga

SEQ ID NO: 4199312 - RNA, 85 nt, Human
ucaauuagcaaguuagacaugagugugcuuacaucugcccaugcagcugaaagcaauaaucucuguacugugguguuauuguuga

SEQ ID NO: 4199313 - RNA, 130 nt, Human
ucaauucauuaagcaaaugaauauuaguuuuuauuugucugcaugucaugucuggcugugguguacacuauaccaauucuauuuuggauugauugcugacagagaaaucauucauuaugcaugugaggaa

SEQ ID NO: 4199314 - RNA, 58 nt, Human
ucaauucuuauugguguucugcuauauaugagcuuugugaacaugaauggguuauuga

SEQ ID NO: 4199315 - RNA, 92 nt, Human
ucaauugaaaguguuuuuaugacccaagaagauaccaaugcucaguugaacauaauaacuggugaauuugcuugggcauaccacccaaauga

SEQ ID NO: 4199316 - RNA, 55 nt, Human
ucaauuugcaugugucuauauguguauaugugcugauauaggcauaguaaaauga

SEQ ID NO: 4199317 - RNA, 99 nt, Human
ucacaaaugcuuguuuaauuggccucuuagagguuaggguggacuuugaaaaucccuaagaacucugagggugcuaauuuuuuuuaccaagaacuugga

SEQ ID NO: 4199318 - RNA, 96 nt, Human
ucacaacuggaugagguagcugcuauuuguaguucaguuuuauaagaugagcaaagagaggcuacgagagguaaguuacaaccagcuagguaguga

SEQ ID NO: 4199319 - RNA, 59 nt, Human
ucacaagacagaaaacauuuagaagauagcuauuaucucauaaguuuuauguguuguga

SEQ ID NO: 4199320 - RNA, 57 nt, Human
ucacaagagcuggacugucuuuucugaugcuguuguuuucacauccagcuuaugugg

SEQ ID NO: 4199321 - RNA, 82 nt, Human
ucacaagauuuacguguacucauuucuguaugucaugcacucaucugugcacaugcacauguggcuauguaauucuguguga

SEQ ID NO: 4199322 - RNA, 62 nt, Human
ucacaaggcagccugcuuccgcagaauuaaaagugggagugucuaaacuggcuuccugguga

SEQ ID NO: 4199323 - RNA, 59 nt, Human
ucacaauacucacucaauggcuucccuuccuggcagugugguuuuguguguguguguga

SEQ ID NO: 4199324 - RNA, 69 nt, Human
ucacaauaugggugugggaacuggaccacagaguuacaguggucauuuccuccccaccacaucuuguga

SEQ ID NO: 4199325 - RNA, 59 nt, Human
ucacaaucugccugccagcagugcuucgugcucugcugaggcccaggagcacuuuguga

SEQ ID NO: 4199326 - RNA, 120 nt, Human
ucacaaugaaauguuucuacuuugcacccuuuggguucaguuguucaaccaguuacaauuaguuagauuaguaacugguugaacaacuguaaucaaagagcacagauugacuuguugugg

SEQ ID NO: 4199327 - RNA, 74 nt, Human
ucacaauguuuccaucugcuagguaaaugaaucaagaauaguuuuacauucauaauuacagagggaaaguguga

SEQ ID NO: 4199328 - RNA, 63 nt, Human
ucacaauuguuuuuaggaucaagccuagagauaaagagccauggucucugaaaauaauguuga

SEQ ID NO: 4199329 - RNA, 82 nt, Human
ucacacaaggcaacgugcuuuagagagaugcuuguaauuucaaggauacaaagcagaugcguuggagcaguugccuaugaga

SEQ ID NO: 4199330 - RNA, 63 nt, Human
ucacacauauggcuuguggagaguuguaguaaguccugcuaugauuuccaaagucauuucuga

SEQ ID NO: 4199331 - RNA, 73 nt, Human
ucacacaugaguaaauacagggagguuuaacauaacuuuauuaucuugcugucuuuucuucucauugauguga

SEQ ID NO: 4199332 - RNA, 71 nt, Human
ucacacauuagccauuucaucagaaccacacaucguuuggcaguggagaugaacauggugauguuaaguga

SEQ ID NO: 4199333 - RNA, 88 nt, Human
ucacacauuagguuggugcaaaaguaauugugguucuuuccauuaaguguaaaacugcaauuacuuuugcaccaaccuaauaguuuga

SEQ ID NO: 4199334 - RNA, 67 nt, Human
ucacacauuccaaaaucaaggguauaagcaauuacagccaacucuugauuauccuuggcaaugugga

SEQ ID NO: 4199335 - RNA, 70 nt, Human
ucacaccugccuucagcauugccaugagggcugggcgagguggcccgugcaguccuggaggaagguguga

SEQ ID NO: 4199336 - RNA, 84 nt, Human
ucacacuaucauuuguaccauacuguuuauuacggaccaguucagauucgaugagaaacacaagggugcaaauaccagaaguga

SEQ ID NO: 4199337 - RNA, 78 nt, Human
ucacacugaguccugagaacauucuaauuuggaagucacauaaaagagaaaaacaggugucaugggagucagaaguga

SEQ ID NO: 4199338 - RNA, 60 nt, Human
ucacacuuaucccacucagucauggcaaagagaagacacuacuggcacugguaggugugg

SEQ ID NO: 4199339 - RNA, 72 nt, Human
ucacacuucccuccuggauuccagacugucaggagggaugccuccgaggugguguuuggaaggaggugcuga

SEQ ID NO: 4199340 - RNA, 55 nt, Human
ucacagaauaaauguacuggccauguugucaugggaaagucauuuacuuuuguga

SEQ ID NO: 4199341 - RNA, 57 nt, Human
ucacagacagugucccuuuguugggggagaccucaguggccucuggcuuugcuguga

SEQ ID NO: 4199342 - RNA, 60 nt, Human
ucacagaugaggauagguuuauauuuaaaggacaaauucugaacaaaguucuuaucguga

SEQ ID NO: 4199343 - RNA, 87 nt, Human
ucacagcaccucaucucuuucucagaugguggagaagcaaacgguuccuggcgucucgcuguggacagggagaaugaggugcucuga

SEQ ID NO: 4199344 - RNA, 57 nt, Human
ucacagccuggucacucugcccaauagcaaaucuggugcugaguugaauggcugaga

SEQ ID NO: 4199345 - RNA, 86 nt, Human
ucacagcuaaugagcagcuggaggccuuguuggaaguuaauaaacucaucuucagaggaggcaggcugugcugcaccuuguuguga

SEQ ID NO: 4199346 - RNA, 73 nt, Human
ucacaggccaguaagacuguguucaugccaaacacaacaguggaauaggcgaaaccugguuuccugcccuuga

SEQ ID NO: 4199347 - RNA, 98 nt, Human
ucacagggacuucccagggggcaguaggcauagaaagaagcaccaagaugaaggcuuggucaaucugaaaguagccugggccccauggagcucaguga

SEQ ID NO: 4199348 - RNA, 87 nt, Human
ucacagguaucccugcagggccauugugcagacgguccccaucuggaugacaucuguggcugcgcccugggggagcucuaccuguga

SEQ ID NO: 4199349 - RNA, 71 nt, Human
ucacaguauuuacuaucaccauuaacccauagagugaguuugguuuggugucuuggaaguaggugcugaga

SEQ ID NO: 4199350 - RNA, 64 nt, Human
ucacagugugaaccuguucacugucaccaacucacucaucacauuuggaacuuguucacuguga

SEQ ID NO: 4199351 - RNA, 69 nt, Human
ucacaguugagcagguugugcacugcaccauguuagcccugguacaguacacaaccugcccaacuguga

SEQ ID NO: 4199352 - RNA, 79 nt, Human
guugggccgggcacagguugagguagaugcucucuggcacuuugaguuugucauuggugaucugaugccugaguuuggc

SEQ ID NO: 4199353 - RNA, 86 nt, Human
guugggcgauggaggucguucuguggcgcucagccugcagcacagcuggccuggagguccagaacgugccuacucucauacccggc

SEQ ID NO: 4199354 - RNA, 62 nt, Human
guuggggagacuggccgagauccugcugggauggcgccuggucagugaugcuaucccccgac

SEQ ID NO: 4199355 - RNA, 74 nt, Human
guuggguagaagauauugcauauuggaugaguugcaaucccccaaccucucuuucagcauuguuucuauucuac

SEQ ID NO: 4199356 - RNA, 98 nt, Human
guuggguaggauuugcuucucugugcccucuacugucucagauucuauguaucugccagauggcagggguaccuggaagccaguagcccuuaccuggc

SEQ ID NO: 4199357 - RNA, 67 nt, Human
guugggucuaaaaugagucuuccuagguuagaaaaacuuuucaaauuagagacucuuuuaggauaac

SEQ ID NO: 4199358 - RNA, 80 nt, Human
guugggugcaccggccugggagguaggaguccugaguucaaagccagucucugccacuucuaagcugcgugugcuucaac

SEQ ID NO: 4199359 - RNA, 106 nt, Human
guugggugggggcaggaaagucggcgacucugagccaccagauccccaggaugccccguggggaggugcgcacagagcaucagcagccgccugcccgccggccggc

SEQ ID NO: 4199360 - RNA, 99 nt, Human
guugguagagaugccucugggggcuaguuguccugguagugaagcuauauguguugcaggucuucauucuugggaucagagagucagggaggugcuaac

SEQ ID NO: 4199361 - RNA, 103 nt, Human
guuggucaggcuggucuugaacuccugaccuugugauccacccgcuuuggcauccccaaagugcugggauuacaggugugagcagccaccaugcccagccaac

SEQ ID NO: 4199362 - RNA, 76 nt, Human
ucaauguauauauguguauauaugagugugugcauagguguauuugcacaaauuuguguaugcucacgcauuuuga

SEQ ID NO: 4199363 - RNA, 127 nt, Human
ucaauuaaaggauaauuuuuauuauuauguuaaaauguuuugauuaauguguaguuaagcagguguuaaacuagauuuuggccauuauacaagacauaagcaugguacuuaauuauauguuaguuga

SEQ ID NO: 4199364 - RNA, 60 nt, Human
ucaauucccauauuuuauaugauuuacuuuauaguaguaaaugugaaauguggggacuga

SEQ ID NO: 4199365 - RNA, 58 nt, Human
ucaauuggcuauucugacaccugaggagucagcuccccaggcucagcugagcucuugg

SEQ ID NO: 4199366 - RNA, 58 nt, Human
ucaggaaacuacaguugaacuagauccauauguggcuagaaaacauguagcuuucuga

SEQ ID NO: 4199367 - RNA, 118 nt, Human
ucaggaagcucauuucggucauguugcggugcuuugcuggaaucgaggaaugugcuuaauucgaaggugucuuugucgguuacagcaacgcugcugcugaaugccgugagaagccuga

SEQ ID NO: 4199368 - RNA, 57 nt, Human
ucaggaaggcgccccaucaggaaacaucuguuucuugccuuucaugcccuuuccuga

SEQ ID NO: 4199369 - RNA, 76 nt, Human
ucaggacaaacucuaaaguguggcuuauauuccagauucccuuuggggaucaggcugaagcuaggacuuugccuga

SEQ ID NO: 4199370 - RNA, 55 nt, Human
ucaggacagccagggugcagacucagggaagagcaggucggcccggcugugcugg

SEQ ID NO: 4199371 - RNA, 129 nt, Human
ucaggacuauuggaugagccaugaaacuguuuaugaacgguuuuuuauguuucuuaugcuuaacuggcuuaguugagcagccagugcagaacacauggaaaauguucuugcagcuuaccacaguucaca

SEQ ID NO: 4199372 - RNA, 66 nt, Human
ucaggacuccuggcuuucccucuuaggcuaaaaauaucuagcugaagaaaggaugacaggaacuga

SEQ ID NO: 4199373 - RNA, 60 nt, Human
ucaggagaaucagggcuguccuuugcugccagaagcagagggcuuguuccuuuuucuuga

SEQ ID NO: 4199374 - RNA, 63 nt, Human
ucaggagacuggcagugcccacuccuagggaggaaacuggguuacagcuagaaguacuuuugg

SEQ ID NO: 4199375 - RNA, 73 nt, Human
ucaggagcagcaugggugagaggcaguggaauguacuaaggagaaaacugccaaauucacauucuguaccuga

SEQ ID NO: 4199376 - RNA, 61 nt, Human
ucaggagccugaaagaggucuaacuaauuaaauacuaggauuucuugccccugcucccuga

SEQ ID NO: 4199377 - RNA, 76 nt, Human
ucaggaggaaaguuccacucaacuugcuauuucucaucuagcucggcaguguugagaggccuggcucuuuuccuga

SEQ ID NO: 4199378 - RNA, 60 nt, Human
ucaggagggcuaagacuguagcuuguuaucaggcauuucuuacucuuaguccaaacuuga

SEQ ID NO: 4199379 - RNA, 88 nt, Human
ucaggaggugggcagaugauaaaugcaugugcuuugucugccaucucaaagcuucaguuuucuauuguuaauuguuaccaccuucuga

SEQ ID NO: 4199380 - RNA, 88 nt, Human
ucaggauuaugcaaggacuuauuacaguguaaacaugcuugccauuuuggcugccugucaaacguaauacuauucuuagugaugcugg

SEQ ID NO: 4199381 - RNA, 55 nt, Human
ucaggcaggacaauuauuuaggacugaagcauugcaggauaauuauccuuccuga

SEQ ID NO: 4199382 - RNA, 69 nt, Human
ucaggcaggguuuacaauagcaauaauguaauucaaauaagcaauuauuguaauugaccuuggcgauga

SEQ ID NO: 4199383 - RNA, 60 nt, Human
ucaggcugggagacaaucacugugacuguugacaucuguggcuucaguuucccagucugg

SEQ ID NO: 4199384 - RNA, 58 nt, Human
ucaggcuucacuccuguccaagguuagcucugcuucugggucaggcugggaguccuga

SEQ ID NO: 4199385 - RNA, 57 nt, Human
ucagggagaggugagagccugugaaggcggcucuucacaugucucuaaucucaguga

SEQ ID NO: 4199386 - RNA, 69 nt, Human
ucagggagcuaggauccugaaggugggaagggagcagauguccaccagacacugggccuggcuucuaga

SEQ ID NO: 4199387 - RNA, 78 nt, Human
ucagggcagaauccaaagaauuuuuaagaggaugugaaaaaaaugacuagagagagcuuuccuuggauugugucuuga

SEQ ID NO: 4199388 - RNA, 64 nt, Human
ucaggggccucucuuuuaggguguaaauucacagcccccauauugugaacagagaggacucugg

SEQ ID NO: 4199389 - RNA, 99 nt, Human
ucagggguugcuccgucaucucugccugugugcaacuugcaguuuugcaguuuucugcagcagcugaggcgcuggcgugggaaggcggagcuccccugg

SEQ ID NO: 4199390 - RNA, 65 nt, Human
ucaggguaugugcguaauaagugacagacauuuuacgucguguuacaugugugcacacauucugg

SEQ ID NO: 4199391 - RNA, 100 nt, Human
ucagggucaucaugaaguugcuguguuucuaaguaaaggagcucccuugagaagagauagggaaguuugugagaaauaugucagcuuucguggccucuga

SEQ ID NO: 4199392 - RNA, 95 nt, Human
ucagggugucagcagggcacgauccuccuggaggcucuaagggagaguccaagccuucgucuuucuggcuucuggaggcugccuguguuccuuga

SEQ ID NO: 4199393 - RNA, 82 nt, Human
ucaggugaguguggggagcugccuuagaccggagguguggacuuuuccuucccuuuuaggaagaaggcauucccguauguga

SEQ ID NO: 4199394 - RNA, 64 nt, Human
ucaggugauggugggagaggagaagcaagaugugcucucaugccuucuucaccaguuuaccuga

SEQ ID NO: 4199395 - RNA, 55 nt, Human
ucagguguguuguauuuuaccagguuuuccaugaggaucaaguacgaucaccugg

SEQ ID NO: 4199396 - RNA, 59 nt, Human
ucaguaaauuaaaguugggccauucgucaucacugacaaauugccccauuuugaacugg

SEQ ID NO: 4199397 - RNA, 58 nt, Human
ucaguaacuucaugaccaagcacacagguguuuaucauucuggugcaugagauacuga

SEQ ID NO: 4199398 - RNA, 94 nt, Human
ucaguaauaagauuuugguucauuugaauguaaaugcugcagcugaguauccagaagcugcguuuauuuaaaucccuauccaagauauuacuga

SEQ ID NO: 4199399 - RNA, 61 nt, Human
ucaguaggucugacugggcccuaaagaacggcauuguuaacaagcccccagaugcuacuga

SEQ ID NO: 4199400 - RNA, 71 nt, Human
ucaguauacgugugcuguuguuuuugguuuuacuuaauaaguguuuagugugauacacauacguaaacuga

SEQ ID NO: 4199401 - RNA, 73 nt, Human
ucaguauccuuguucugauuuuucugggaacuagauguuacugggagaugacucagagcaggccaagcccuga

SEQ ID NO: 4199402 - RNA, 66 nt, Human
ucaguaugguagccauuagccccaugugacuuauugaauccuugaagcauggcuaaucuguacuga

SEQ ID NO: 4199403 - RNA, 74 nt, Human
ucaguaugugcuaacugucaugcacauguguuuauaaugcugagcauaugaugauacuuggucauccaugcugg

SEQ ID NO: 4199404 - RNA, 72 nt, Human
ucaguauuccuggaaauacaagcuucuagccaacaguuugcaaaucaaaguucuguguuuucggaagacuga

SEQ ID NO: 4199405 - RNA, 67 nt, Human
ucagucaauaaguaauaggcaucuaauuugcauuaagcacaauucuaggauuccacuuauugccugg

SEQ ID NO: 4199406 - RNA, 113 nt, Human
ucagucucagaagagggauuggagggggaacccuguuacacacagcagcgucaacuuaaaauugcaccuuagcagcucugugugucagggccuuccagcccuuaugaaacuga

SEQ ID NO: 4199407 - RNA, 75 nt, Human
ucagucuucuaagcauuggucuuaauacugcauguucuuugcaaaauauaaaguguuguacaaauguaugacuga

SEQ ID NO: 4199408 - RNA, 130 nt, Human
ucagucuugucagguaauggaggggggaguucccugauccugggacugaaugggugcuucagcauuagcugcgccuguagaaguccugugauagccgagcacccucccucagauggccuguugagauugg

SEQ ID NO: 4199409 - RNA, 55 nt, Human
ucagucuuucgaauucagccagccagccagaaggggcguguugaggaaaggguga

SEQ ID NO: 4199410 - RNA, 93 nt, Human
ucagugaaacaaggcuuugggaguaagaaguccuggguucaagugcuauggaugcuguggaugccuugccccauugccccugggcccaccuga

SEQ ID NO: 4199411 - RNA, 96 nt, Human
ucagugagauauucacuaauaguuugaauaaaagguuauuauuugaguauaacuuuuaaaauacacagacaauaugggaguaaaucaagagacuga

SEQ ID NO: 4199412 - RNA, 58 nt, Human
ucagugagcugaaguccuuugaagaggcuucuuuccucaaaggacuguagcucacuga

SEQ ID NO: 4199413 - RNA, 75 nt, Human
ucagugaggaaugccagccaucuaagcccuagugaagcugugggugaagccagggacugacacuuccuggacuga

SEQ ID NO: 4199414 - RNA, 80 nt, Human
ucagugagguuaaagugcaguucccaaggucacacagcugguagaaguugagaugugauuugaacugacugccucuaggg

SEQ ID NO: 4199415 - RNA, 63 nt, Human
ucagugauacaugauuaguggaauaaggcuuugccaaccauuucaaggugucuguaccacuga

SEQ ID NO: 4199416 - RNA, 126 nt, Human
ucagugcaucauuaguuaaaugaacaaauuaguuaaaacucuguauuugcuguggguuucaaaaauuaccuggacaguaauuagaguuacaaagaguucuaaaacaaaaguugaugagaauaauga

SEQ ID NO: 4199417 - RNA, 55 nt, Human
ucagugcauuguucauuguaggcacucgguuuacgaauugaauaauaguagcuga

SEQ ID NO: 4199418 - RNA, 74 nt, Human
ucagugccgccuggcacucccacuuccugcuccuguuugguuucaccccaguggugccggguggguuuugcuga

SEQ ID NO: 4199419 - RNA, 78 nt, Human
ucagugcugugaagucaagaaugcaauuugagcugugccgacaggaaacaaauugaucuuuuuggccuguauuccuga

SEQ ID NO: 4199420 - RNA, 115 nt, Human
ucaguggacucaauucuguuauuuuagaaaguucaaauuauagaagguuugagguggcgaggcacuuacgcaucaucuaguuuaacuuucuuucugcauggaugaguaaaacuga

SEQ ID NO: 4199421 - RNA, 65 nt, Human
ucaguggauuggaugagaucugcucacauuauggaggaugaucugcuucauucaaagucuacuga

SEQ ID NO: 4199422 - RNA, 67 nt, Human
ucaguggauuuuccuuuccaaguagaaaugcagugcaauucuaaauggaaagaaaauaccuaaauga

SEQ ID NO: 4199423 - RNA, 60 nt, Human
ucaguggcauuugguuagaaugucuggcugacugaggacaagauaaugaagugcaauuga

SEQ ID NO: 4199424 - RNA, 86 nt, Human
ucaguggccuugugcagcuagccauguggcuccuguggguguaugugcggcuuggcaggggcuguggcaugggagcaggggccugg

SEQ ID NO: 4199425 - RNA, 66 nt, Human
ucagugggaaaggcagaguuguuggaggcauaacccaccagugccuugaagucugccuuuuaauga

SEQ ID NO: 4199426 - RNA, 56 nt, Human
ucagugguguguauauuuuguuugacauuuuaagcagaagaaagccacaugacuga

SEQ ID NO: 4199427 - RNA, 57 nt, Human
ucagugucaggcgccccaaagcauuuauucugugccaggcccugugcuggaugcuga

SEQ ID NO: 4199428 - RNA, 68 nt, Human
ucagugugcagccccgugcagugagaaaacaaaugcccaaggcuucugaugauggcggcuggagcuga

SEQ ID NO: 4199429 - RNA, 59 nt, Human
ucagugugcuuauugauauagcuuaaaacacuuaauacaagcuggucuuaaguaacuga

SEQ ID NO: 4199430 - RNA, 63 nt, Human
ucaguguggaaaauccuuuggcacaagcucuuaccuuauagugcacaagagaauacacacugg

SEQ ID NO: 4199431 - RNA, 69 nt, Human
ucaguguuggagauaauugcacagagaccuguuucccuuuucuucuuauccauuuaucugcaacacuga

SEQ ID NO: 4199432 - RNA, 80 nt, Human
ucaguuaaaguucuuacagaaaauagauaacauuuaaaaauauuaagugauguuuggauuugcugagaucuuugaccuga

SEQ ID NO: 4199433 - RNA, 61 nt, Human
ucaguuacacauaaacauuaaaggggccugacuuagggcgcucuuugccucuguggacugg

SEQ ID NO: 4199434 - RNA, 94 nt, Human
ucaguuauagcucuguuuuuuaagugguguaacacauuuaguaauuuuaauuuugcagaauguagaucaucaucaaggaauagaauaaagcuga

SEQ ID NO: 4199435 - RNA, 64 nt, Human
ucaguuaugucagccgauauuugucaugcuaaugaguugugguaagcuuggcugauguuauugg

SEQ ID NO: 4199436 - RNA, 69 nt, Human
ucaauuuagaguucagcaugacuuugauauacaaagcugucaagggcauuaugagaacuauggauuaga

SEQ ID NO: 4199437 - RNA, 64 nt, Human
ucacuugaacccaggaagcagagccaaggucgcaccauugcacucuagucugggugacgaguga

SEQ ID NO: 4199438 - RNA, 78 nt, Human
ucacuugaacccaggaggcagagguugcagugagccaagaucauaccauugcacauuccagccugggugacaggguga

SEQ ID NO: 4199439 - RNA, 76 nt, Human
ucacuugaacccaggagguggaguucacagugaacgaagaucgugccacugcccuccagccugggugacagaguga

SEQ ID NO: 4199440 - RNA, 69 nt, Human
ucacuugaggcugagagguugagggugcaguugagcugagauugcaccacugcacuccagccugaguga

SEQ ID NO: 4199441 - RNA, 76 nt, Human
ucacuugagucugggagguugaggcugcagugagucgugaucacgccacugcacugcagccuggccaaccgaguga

SEQ ID NO: 4199442 - RNA, 58 nt, Human
ucacuuggguguugaguguggagacuauugcguguggagacuaaacugcaccuaauga

SEQ ID NO: 4199443 - RNA, 80 nt, Human
ucacuuguugauggauuuuugggucauugcaguuuuugauauuacuaauaaaacugcuauaaacauucauguacaaguga

SEQ ID NO: 4199444 - RNA, 74 nt, Human
ucacuuuacagcuuagugguauggaucaugacaacccaacagaagauauguccauccagaaccugugaauguga

SEQ ID NO: 4199445 - RNA, 116 nt, Human
ucacuuuggaauuuuacaaaagcugugauggucaggcccuaucuccaaagauucugauucaaugcauuuggaauggaaccuaguuauccacauguuguauaaaguuccaaaaguga

SEQ ID NO: 4199446 - RNA, 63 nt, Human
ucacuuuggauuauguaauuucuuucuauucauaaugagcagcucuuacaugaugccaaguga

SEQ ID NO: 4199447 - RNA, 129 nt, Human
ucacuuuucaagcccauggacuaucucccagugcuguucauuuuaauauucugcagaguacuuaagcauuacagaauauagaagcuggaagauacuuggcagucauuuagucccucauguucuagauga

SEQ ID NO: 4199448 - RNA, 90 nt, Human
ucacuuuuccagguagggcggauggugcuucuucucaacuggcccucugcaugcugcgagaaggacuacacaucuggccugguagagugg

SEQ ID NO: 4199449 - RNA, 130 nt, Human
ucacuuuuguuaaacugcuugucacacuuugucuuuguuuuuaagaugauagaucugucaaugugaaauguuccauauuacaguucuguuucuuuaggacaaaaaugaaauccaagcuauuucuaaagga

SEQ ID NO: 4199450 - RNA, 75 nt, Human
ucagaaaagcuaugguuuguaggcuauugggagccucucucacaccgucccuaaaccaucucugacuuucucuga

SEQ ID NO: 4199451 - RNA, 99 nt, Human
ucagaaaauguuuauugaauaugcucuaugugccaaacaauuguguuacggcugaauauaugaauguuuggcuagauagauggaugaaugaacaaauga

SEQ ID NO: 4199452 - RNA, 65 nt, Human
ucagaaagauguacuaagggcagacacagaauuccaacuggagucugcucccagacaugaucuga

SEQ ID NO: 4199453 - RNA, 89 nt, Human
ucagaaaguacuugagagcuaagguguccuggaggcccauucuccggaguggguucagguuggccugagcacuggcugguguguucuga

SEQ ID NO: 4199454 - RNA, 62 nt, Human
ucagaaaugucugcaaaccuaaguuguguuuagaaacaaagcuaugaggcaugcauuucuga

SEQ ID NO: 4199455 - RNA, 72 nt, Human
ucagaacagguuguacuaugucccccaaaucauacugucuuagagggacaaucuagauaaucugucuccuga

SEQ ID NO: 4199456 - RNA, 84 nt, Human
ucagaacuccagguucuuuggccuuuggacucugggacuuacaccaguggcucccagguucuugggccuugagccucagacuga

SEQ ID NO: 4199457 - RNA, 62 nt, Human
ucagaacuuaaagccgauugggccacagaaucagguaaaucagaucuugcauuaaguuguga

SEQ ID NO: 4199458 - RNA, 73 nt, Human
ucagaagaaaaaagagcuuuccacacuagucagcaacuguugguguuuaaguguucuuucauuuuucuucuga

SEQ ID NO: 4199459 - RNA, 90 nt, Human
ucagaagaccaggcagcugggcagacugcagugguuacuuguagacuuguaaacaacuucugggcuguccaaaacugccuaguuuuguga

SEQ ID NO: 4199460 - RNA, 66 nt, Human
ucagaaguaggagacauucuugguccuaaggcaagauugccugucccugaauaucucaacuucuga

SEQ ID NO: 4199461 - RNA, 105 nt, Human
ucagaagucgaauggcccuuggcaaugcucuuuaaccuauucugaagaaguucccuuuaaguuaugaaguagguuaagagcaguagaccaauauuuuguuucuga

SEQ ID NO: 4199462 - RNA, 68 nt, Human
ucagaauaaaacuuauuagaauuguguaccaucaccaaguaugaauucugcaauagguuuaguuuugg

SEQ ID NO: 4199463 - RNA, 76 nt, Human
ucagaaucccucugcagcugguuccugacaucgcaaacguuaucugcaauucuuggcaguuucggaaggaugauga

SEQ ID NO: 4199464 - RNA, 56 nt, Human
ucagaaucgguggggccaggaauccagauuuuuggcaggugccccaaugauucuga

SEQ ID NO: 4199465 - RNA, 55 nt, Human
ucagaaucuaaauaggcuccaggcgcuggugacuuuuaaagcucugugauucuga

SEQ ID NO: 4199466 - RNA, 79 nt, Human
ucagaaucugcauuuucaugaguucccaggugauuugugugcacauucaaguaccagaagcacugaacucacagacuga

SEQ ID NO: 4199467 - RNA, 55 nt, Human
ucagaauggcccauaaauagucccuauuugggagcuuuuggaacugcuauuuuga

SEQ ID NO: 4199468 - RNA, 88 nt, Human
ucagaauuagaugucuauacugaugggauacuauuauaugauaaacaugaaguuuaauucggugaguaaaauauagauuaucuaauga

SEQ ID NO: 4199469 - RNA, 64 nt, Human
ucagaauucagagggaguggggugaggcagugggaggcaaugaaaauucccucuggauucuaga

SEQ ID NO: 4199470 - RNA, 59 nt, Human
ucagacaaguaaaauaauguaaagggcuacaggagccacaccuuacuuacuuguuguga

SEQ ID NO: 4199471 - RNA, 61 nt, Human
ucagacagggagucagaaaauagaacuuguauguuaauuuuuuauuguuuuccuguacuga

SEQ ID NO: 4199472 - RNA, 59 nt, Human
ucagaccucuugcacccuggcucuugcccaguggcccagagugucagcaagagguuugg

SEQ ID NO: 4199473 - RNA, 71 nt, Human
ucagacuugccuuuuuauaaaaaucacuccaguuacaguguggagaauggauuagagaagggcaaggcuga

SEQ ID NO: 4199474 - RNA, 58 nt, Human
ucagagaaauaauugcugaguuccuucuauguuuaaggaacugggcuaguuucuguga

SEQ ID NO: 4199475 - RNA, 55 nt, Human
ucagagaagcuuaagcuguaaucaaacugcuauuacaguagcugagguucucagg

SEQ ID NO: 4199476 - RNA, 75 nt, Human
ucagagacuccacauguauuaaaguagauaucagaagacauauugaauuucacuuugaugacauuguagcuuuga

SEQ ID NO: 4199477 - RNA, 55 nt, Human
ucagagaugcagugccaccuacagguccggaggcccccaggcgcugggucucugg

SEQ ID NO: 4199478 - RNA, 65 nt, Human
ucagagcuggcacagaaggaucuuagcacauauuugcugagugaaugcaaucccuuucagucuga

SEQ ID NO: 4199479 - RNA, 86 nt, Human
ucagaggacagcagcuaaauaacugacuggcaggguagauuuaugcaauucucaugggguuauuuguugaaggacuguccugcugg

SEQ ID NO: 4199480 - RNA, 58 nt, Human
ucagaggcuucugcucaccucacacuuucuugauacuucugagcagaggcucaacugg

SEQ ID NO: 4199481 - RNA, 76 nt, Human
ucagagggacuugcaggggagacugcguuuccucuaagucaaauuaguggggauguuuucacuuguaucccuauga

SEQ ID NO: 4199482 - RNA, 63 nt, Human
ucagaggggagaauuuggugugcugcauuauaauagccuguagauuucucuuucccuggcuga

SEQ ID NO: 4199483 - RNA, 65 nt, Human
ucagaggucacacagcaaguuugcggcagggccagggcugaaacuuaguguuuguggccuucuga

SEQ ID NO: 4199484 - RNA, 73 nt, Human
ucagagguggccagagucaagagccagguuucauuauaauucucgaguggucauggauagcuggagccuuuga

SEQ ID NO: 4199485 - RNA, 56 nt, Human
ucagaguaaaccugucaucaagaagccugcgugggaugucuaacugguuugccuga

SEQ ID NO: 4199486 - RNA, 72 nt, Human
ucagagugaugggaugggguggagaaaagaaacuucaacagacugaucucucccucugccuuucuagucuga

SEQ ID NO: 4199487 - RNA, 65 nt, Human
ucagaguggugcaagggcaguguugagaugcuuuaagcagcagccugagcuuuagcacuauuuga

SEQ ID NO: 4199488 - RNA, 70 nt, Human
ucagaguugcuuauuauaauuucuugauuguuugauaaaagguacaucccaagacauaugaguacucugg

SEQ ID NO: 4199489 - RNA, 68 nt, Human
ucagaguugucugguccuaaagcuaccuugugucuuauagguggcagcugguaugcagacagaacuga

SEQ ID NO: 4199490 - RNA, 80 nt, Human
ucagauaaagcacauucuuucacaguucugaaacccuuuguuuuaggcuuugcaagagugaaaaauauuguucuaucuga

SEQ ID NO: 4199491 - RNA, 75 nt, Human
ucagauaaucgggucccaggucuggaaaagcagccuuuuccccacguuucuuuccccaccuaggaccuccucuga

SEQ ID NO: 4199492 - RNA, 60 nt, Human
ucagaucagugcugucccgacaacugaggccaaugacauggcacguggcaguagaucuga

SEQ ID NO: 4199493 - RNA, 85 nt, Human
ucagaucguagggaacaaaagagcuuggugcacagugguuaauaucgucaauguaucauacaccaggcucugucuaaucgacuga

SEQ ID NO: 4199494 - RNA, 69 nt, Human
ucagaucuuaggugugaaguguguuuagacauuaaaaaaucagaacacugaggacacugagaauucuga

SEQ ID NO: 4199495 - RNA, 68 nt, Human
ucagaucuuucaucuauguauuuagucaaugaaaacauguugacuacauacuguguguaaagaauugg

SEQ ID NO: 4199496 - RNA, 75 nt, Human
ucagaugauagaugcuaaggucccugaauguguggagcaaagccaacuacucacccuuaguguacuaucauguga

SEQ ID NO: 4199497 - RNA, 74 nt, Human
ucagauguuucacuguaauggaauuuucuuuacaucagugaaauugauuaccagguagugggaugaacaucuga

SEQ ID NO: 4199498 - RNA, 68 nt, Human
ucagauuaaugcagagcauuguuuuuggcaaguuguugaaaacagcuacuucuguauaaugaugcuga

SEQ ID NO: 4199499 - RNA, 98 nt, Human
ucagauucaaccagggagcuaccacaugcuacucaaugcagggcaggauaugaguccucccaucccugcaagagagcaaagggguuaauugguuguga

SEQ ID NO: 4199500 - RNA, 66 nt, Human
ucagauucuagaucagugcuguccaauagaacacuugaaguguggccagugcaacugaagaacuga

SEQ ID NO: 4199501 - RNA, 126 nt, Human
ucagauuggauuaggacccacccuacaagcuucauuuuaauguagucaccucuuuaaauguccugucuucaaauacagucacauucugggguacuggggguuuagggcgucaauauuugaaucuga

SEQ ID NO: 4199502 - RNA, 62 nt, Human
ucagauuuccuguugaagaaguugauaaaaacauuucauuuuucuaaacaaagggaguuugg

SEQ ID NO: 4199503 - RNA, 61 nt, Human
ucagauuuuauuuuccuguuaccaaaguuaaacuuuguccugcaaaggaaauaugaucugg

SEQ ID NO: 4199504 - RNA, 57 nt, Human
ucagauuuuccagccuuucucuccuagcaaaggccagauaaggcugugauagucuga

SEQ ID NO: 4199505 - RNA, 56 nt, Human
ucagcaaaacuguaccuuuguguuacuggcagaaaaggcuaucaaaguuuugcuga

SEQ ID NO: 4199506 - RNA, 58 nt, Human
ucagcaagcagggggauguucagggggcccaagucucccucccucuggggguuguuga

SEQ ID NO: 4199507 - RNA, 84 nt, Human
ucagcaaguugugaaugacagacuucacuuucucaggcauauuugcauauugaaaaagaaguuuguaauucaaauaacuuuuga

SEQ ID NO: 4199508 - RNA, 78 nt, Human
ucagcacccugaggcacaggccacguauacagcaggugguccuuggaugcuuguaggccuggccucagaggagcaugg

SEQ ID NO: 4199509 - RNA, 118 nt, Human
ucagcaccugcaaggggaugcugggugagauccugucugcauucgaguucauggaugcugugugcaugcagcuggucgggcgccaucuccaccuggccagcccggugcaagguacuga

SEQ ID NO: 4199510 - RNA, 68 nt, Human
ucagcacucacaagaguaaguucaugccucuguguauacaguuagagcugaauaugcuuuuguucuga

SEQ ID NO: 4199511 - RNA, 63 nt, Human
ucagcacucgcuaccuaguaaauugacugaugaugcaucaaagcuaguuagaagaguaguuga

SEQ ID NO: 4199512 - RNA, 55 nt, Human
uccagcuccacagccucccuguccuuaauaaaugagcaacagaggcaggagugga

SEQ ID NO: 4199513 - RNA, 76 nt, Human
uccagcugaaggcaauuuggaagaggcagaugcagaaaagcucucuaccuucccucuauuugccuaaaaagcagga

SEQ ID NO: 4199514 - RNA, 85 nt, Human
uccaggcacuuucucuaagaguuauaugaauugcucccucuaaacuggggugagaguucuaaacacuugaggaaccaugcuuuga

SEQ ID NO: 4199515 - RNA, 61 nt, Human
uccaggcaguuuuccagguuguacuauucuucggaauaagcacaacaaacuugcuuaagga

SEQ ID NO: 4199516 - RNA, 67 nt, Human
uccaggcauugccauuccuccagagagaauucuauagcuaugucucugaaugucaacagucccugga

SEQ ID NO: 4199517 - RNA, 89 nt, Human
uccaggcuagcgugagaggcccugguaggucagagugucugguugccuaagcuuuuguacaucaguggccuuggacacguuuuccugga

SEQ ID NO: 4199518 - RNA, 101 nt, Human
uccaggcugucaccugcuuuguaguguuugcugauuucugugacccaucuguugguagguuucaagccaccagugagauaccacagagcaaacagcuggga

SEQ ID NO: 4199519 - RNA, 62 nt, Human
uccaggcuuauacuugacauuugucucuuuuaaauugaaaacaaauguuacauaaguuugga

SEQ ID NO: 4199520 - RNA, 58 nt, Human
uccagggaagagcagaggcuacaacacagaggugugagagagccugguuuuccuagga

SEQ ID NO: 4199521 - RNA, 56 nt, Human
uccagggacacagaguccuucuaucuuauaacuuuagcauccucuguggcccugga

SEQ ID NO: 4199522 - RNA, 56 nt, Human
uccagggccacagaggaugcuaaaguuauaagauagaaggacucugugucccugga

SEQ ID NO: 4199523 - RNA, 59 nt, Human
uccagggcuguuacuuuacauauuuguugagacccuucaguguucuguaacagccugga

SEQ ID NO: 4199524 - RNA, 95 nt, Human
uccagguaccuucuccaauccuaaagcagacagcagguugaauaaaaccaauacacaaccuauuuucuaggcaggaggggaaaaggcccuuagga

SEQ ID NO: 4199525 - RNA, 61 nt, Human
uccaggucucagaccacccucuuuggcccagggugggucaaaccuacugucugagucugga

SEQ ID NO: 4199526 - RNA, 59 nt, Human
uccaggucuggccugcuaggcauguauuugcucgaggccaagagagagccaggccagga

SEQ ID NO: 4199527 - RNA, 71 nt, Human
uccaggugccuuuguuuucaucucacuuucuggcauaggaugcucuaaacuuguaaacaagcauaucugga

SEQ ID NO: 4199528 - RNA, 55 nt, Human
uccagguggcuuuccugggggaaugccugguaauuuucccagaggaaugccugga

SEQ ID NO: 4199529 - RNA, 74 nt, Human
uccagguggguugugucaggcugcagagggagcggccugggccuggcccucugaaccugguagcagaaucugga

SEQ ID NO: 4199530 - RNA, 62 nt, Human
uccagguuauggaugguguuauagucaguuugggaugcuauaacaaaguaccauagacugga

SEQ ID NO: 4199531 - RNA, 74 nt, Human
uccagguucaagugauucuccucccucagcuacccaaguagcuggcauuacaggagcaugccaccaugccugga

SEQ ID NO: 4199532 - RNA, 55 nt, Human
uccaguacugaagcuccuucaaugccuaagugauacuagcuacucagugcuagga

SEQ ID NO: 4199533 - RNA, 65 nt, Human
uccaguaguuggacaaauagauucggucucacaagaggggaauaauuuguguauucaacuaggga

SEQ ID NO: 4199534 - RNA, 64 nt, Human
uccagucaggcugaauucaaggcccaggcccccgugucggaggccuuccucagcacugucuggg

SEQ ID NO: 4199535 - RNA, 72 nt, Human
uccaguccauggccucagucuuaggggguagcuuucuucuccgcagagacucuuggggacucuggaacagga

SEQ ID NO: 4199536 - RNA, 67 nt, Human
uccagucccucaguagugcacaguggcacuugacacagccagaccugcaaggcugagagggcacaga

SEQ ID NO: 4199537 - RNA, 73 nt, Human
uccagucuccaagaaagguuacauucugagguccuggggguuagaacuucagcaucuuuuucuugggggcgga

SEQ ID NO: 4199538 - RNA, 55 nt, Human
uccagucuugucuccuaaccacccaguggguuucugcuaggaaauagggcuguga

SEQ ID NO: 4199539 - RNA, 64 nt, Human
uccaguucuguggcagcgaaggagaggagguaaaagauccuuacgugacugccucaggggugga

SEQ ID NO: 4199540 - RNA, 64 nt, Human
uccaguugcugcuucucucuagagaccuuuuaugcuuguuuaguucucuaugaagucaacagga

SEQ ID NO: 4199541 - RNA, 69 nt, Human
uccaguuuugaagggcacgacaauaguucagacauuugucaguagcuaugaagccacuuuuaacaugga

SEQ ID NO: 4199542 - RNA, 72 nt, Human
uccauaauugucucaucuucauugucucccauccugugacagagcugggugggaggugggaaggagacagga

SEQ ID NO: 4199543 - RNA, 73 nt, Human
uccauacagguggcauaagaacacuaaagaugagaguuuggggguggauuuaugcacacaaacuguguuagga

SEQ ID NO: 4199544 - RNA, 55 nt, Human
uccauacauauccaaagagaaguuccucauucuuuucugcauauguauguaugga

SEQ ID NO: 4199545 - RNA, 58 nt, Human
uccauagaaacuagauugauagcggaauauuuauuccuuuguccugugguaucuugga

SEQ ID NO: 4199546 - RNA, 86 nt, Human
uccauagcucaucuuucuccaggcagugcaagaugaccaccagcagugccaagcuucuauuuugccugccuagaaaucucugugga

SEQ ID NO: 4199547 - RNA, 97 nt, Human
uccauaguacauguuaccuaaugucuuucucauaacagauaugguuuacugaguauuuguuauguagaagacacuggaccaaguagacaacuuugga

SEQ ID NO: 4199548 - RNA, 86 nt, Human
uccauaugaucuuaggaaaguuggcugauuucucugacguuuucuucaucuacacguauaugaaaaaguuaauuucugucauuggg

SEQ ID NO: 4199549 - RNA, 56 nt, Human
uccauauuuuagauaaaguuauguagacaaucuauuggcucuguucaauauaugga

SEQ ID NO: 4199550 - RNA, 57 nt, Human
uccaucauuuguccuggaaagacagccagccgggcgguacccagguggaaucgugga

SEQ ID NO: 4199551 - RNA, 71 nt, Human
uccauccauuuguuucccuugggaaacagcagcuccucugagguuucccauaucuagggagaggaggugga

SEQ ID NO: 4199552 - RNA, 55 nt, Human
uccaucuccagguugacuucagucaauaauccuauugucuuaaggcuggagugga

SEQ ID NO: 4199553 - RNA, 92 nt, Human
uccaucugccucacauauaagaaggacguugggaccaggcgugguggcuuacgccuguaaucccagcacuuuggaaggcugaggcggaugga

SEQ ID NO: 4199554 - RNA, 101 nt, Human
uccaucugucugucugguauuccuggagcuuggucacgcugcgggagcucuggcuugcagcuggcagggcccgggguugaagggacagcucccagcaugga

SEQ ID NO: 4199555 - RNA, 89 nt, Human
uccaucuguuugucuuaaauuaggacucuaguucuggaaucaagcuugagacucugagaacuuagggccuaauuuuacuuuacugagga

SEQ ID NO: 4199556 - RNA, 95 nt, Human
uccaucuuauccuacaaucaggcagcaaguauuuacugaguaaugauugccugccagcagcaugcaguaaguacccugugauguagagagauaga

SEQ ID NO: 4199557 - RNA, 77 nt, Human
uccaucuuuuagauguuuuaacucuugguuagaaugauauuauauuuuaccuagaggcaaaauguguagcagagaga

SEQ ID NO: 4199558 - RNA, 82 nt, Human
uccaugaaagcaauauuucagcuagcagguggugaaguaaauuuuuagagcaaguaccugucagcuccaguauuccuuugga

SEQ ID NO: 4199559 - RNA, 60 nt, Human
uccaugcccccaucucuguuggcuccucagggcucacuccuggagguggugggcaaagga

SEQ ID NO: 4199560 - RNA, 62 nt, Human
uccaugcugaguauuuguuugaauaacuuaucaguucauuggggcauauacuuaagagugga

SEQ ID NO: 4199561 - RNA, 95 nt, Human
uccaugcuguauauacugccugucuaccagucacuuagcggccaucuaggcuguuagauggacuguagcagcaacauagugcuuauggucaagga

SEQ ID NO: 4199562 - RNA, 84 nt, Human
uccauggguacauaaugagcuaguuaaguuuaggugucugugagagauguccagcaagugguugauaauauguauuagcauuga

SEQ ID NO: 4199563 - RNA, 71 nt, Human
uccauggugcggguggcagcucaucccuucucaaacuuuuugaggaagcuccccaagccugcccuagugga

SEQ ID NO: 4199564 - RNA, 64 nt, Human
uccaugguuagaaauagcggacccucggggaaggggucuccagcccacucuagauauucgugga

SEQ ID NO: 4199565 - RNA, 89 nt, Human
uccauguaagccagauuugggugugugcacugguuugguuuuguuuacuuuggcagcugcuacaauucacaucuggauauauauacggg

SEQ ID NO: 4199566 - RNA, 69 nt, Human
uccaugucuguaagaggccugcugcaugaucuuuugagacagaauggcagaauuuuaaagacagaugga

SEQ ID NO: 4199567 - RNA, 115 nt, Human
uccaugucuucagauccagguccuugcccaugucuggcagagacuccaccugagagcgucucggguaggcucugcaggcuggguuccuggcgcccugcucuguacucuuuaugga

SEQ ID NO: 4199568 - RNA, 55 nt, Human
uccaugucuucaugugucuaacuuccaaggagggggcuaacagcacagacaugga

SEQ ID NO: 4199569 - RNA, 60 nt, Human
uccauguggccagacacuggcauaagaggcugaaaugccccagugguuggaaacuauggg

SEQ ID NO: 4199570 - RNA, 64 nt, Human
uccauguggcuuucaugauuaagcagccacucuggccuguuuaguauuuaagguuuuagcagga

SEQ ID NO: 4199571 - RNA, 56 nt, Human
uccauguuuuguguguguuuccucccucuaggauggaagcacugugguggcaugga

SEQ ID NO: 4199572 - RNA, 102 nt, Human
uccauuaugucacaauguucccuauuuuauuuagguuuaguuguugugcaacugcugauuauugaaguagaggguggaggacauauguauuucauauaagga

SEQ ID NO: 4199573 - RNA, 80 nt, Human
uccauucuucacugacccaccaguuugcaacccuggucuaagguauccaggguuugcagggaaaucagugaggaugagga

SEQ ID NO: 4199574 - RNA, 61 nt, Human
uccauugauagauauuuugguugugucuacuuuuuauuauuaaucaaaauauuucugugga

SEQ ID NO: 4199575 - RNA, 75 nt, Human
uccauugcucucuccagaagacccauccucaugcucugcucuucccugggcaugugucuuuauggagccacagga

SEQ ID NO: 4199576 - RNA, 88 nt, Human
uccauuucgaagugauggcaguuuuagaacuuuucaaugcacuuuuguggaggcuccugaagaguuuaaaaagccaucaagugaagga

SEQ ID NO: 4199577 - RNA, 114 nt, Human
uccauuuuauaaguuaaagaaucauagcaguaaaaacuuuauagccauuucacucuaauuauuagagugagaaccucgaagauuuugcccuuugaaaaugacuuguuauuuggg

SEQ ID NO: 4199578 - RNA, 68 nt, Human
uccauuuucucuuccggaggugugcacuaaaauuuguacucuuccucuaugggaacuuugacagugga

SEQ ID NO: 4199579 - RNA, 69 nt, Human
uccauuuugucauaucacacaauuuugucagguauucaggcaaggauuggcugauugacaucagcuggg

SEQ ID NO: 4199580 - RNA, 63 nt, Human
ucccaaagggugucagcagcaagcuccaucgacuugccuacauugcccaccccaagcuuggga

SEQ ID NO: 4199581 - RNA, 70 nt, Human
uacaaaaaacaccugugugaguauaugugcacacgugcauucuuuugcauacacacaaucagguuuugua

SEQ ID NO: 4199582 - RNA, 68 nt, Human
uacaaaaagucgggagacuagaagcccuguugucuccucuagcaggcuucugggauucccuuggugug

SEQ ID NO: 4199583 - RNA, 130 nt, Human
uacaaacauaugccaaaagcagagcacuuuucuaacauaguuuaagauugcuaggagaugaagaggcuacaugucuguaauuauuuuaggggggugcuuuauaagaacuguuugcuuaaggaugacugua

SEQ ID NO: 4199584 - RNA, 61 nt, Human
uacaaagaggcagcuccauuuuauuuuauuagccucccuuagauguggcagucuuuuugug

SEQ ID NO: 4199585 - RNA, 55 nt, Human
uacaaagagguaauugcauauagauuagagaaguccaguguauucccuuuuugua

SEQ ID NO: 4199586 - RNA, 103 nt, Human
uacaaauacagagucuagcacaguaugguaucagauugcuauucaauaaauaauggauauuauagggcuaauauuguugcugagguccuguauucuaacugug

SEQ ID NO: 4199587 - RNA, 90 nt, Human
uacaaauauaaacacaauguguacaccugucuuuacacauacauacaaguguaugugaaugaaaugugugugcgugugugugugugugua

SEQ ID NO: 4199588 - RNA, 129 nt, Human
uaccaggaacccuaccuccccaccucugacccagcucuccagugcccaggagaauucccugcuuuguaaaaugaauucuccuggacacuggagaucugggucagagcuggagagauaggguuccuggca

SEQ ID NO: 4199589 - RNA, 56 nt, Human
uaccaggcagcugcacagaggccuaagugcacaggaaagguggaggugcucuggua

SEQ ID NO: 4199590 - RNA, 55 nt, Human
uaccagggaccgccacacugcaauuaucauugcagcccggguugguuugugugug

SEQ ID NO: 4199591 - RNA, 57 nt, Human
uaccaguugauguuuuaaauaguauuccuuugaauccuaugccauugucaucuggua

SEQ ID NO: 4199592 - RNA, 56 nt, Human
uaccauaugaaacaugagaaauggagagcuauaguuuuacccugauguuucuggua

SEQ ID NO: 4199593 - RNA, 55 nt, Human
uaccaucacauaugcuguauuggcuauuuucugugaguacaauguguuguuggua

SEQ ID NO: 4199594 - RNA, 130 nt, Human
uaccaucaccuggagaacuuaaaaaaauaaagacugcugccugggccucacccuagaccaauuagaucagaauuuccaggaguugaggucugaacaucauuaauuuuuuaaagcuccccagcggauuuua

SEQ ID NO: 4199595 - RNA, 63 nt, Human
uaccauggcucagcugacucggcuucucccaguaaaggaagaaugggcuggcugagcccggug

SEQ ID NO: 4199596 - RNA, 65 nt, Human
uaccauggggaagagccagugagcugaggugucaaaucucaacugaucuauuuccuaacugugug

SEQ ID NO: 4199597 - RNA, 68 nt, Human
uaccaugucaagcgagacauguuuaaugacaaguggaucuuguuuugacaucuggcuagauuuuggua

SEQ ID NO: 4199598 - RNA, 68 nt, Human
uaccaugugcagccacagaggagggaugcagguucaccccuaaguguccaaauuguggugauaaggua

SEQ ID NO: 4199599 - RNA, 94 nt, Human
uaccauuaugaauacauuuuaccuuaaagucuauauugccuguuauuaccauagauacacuaggguuuugggguggggugacuuuugcauggua

SEQ ID NO: 4199600 - RNA, 98 nt, Human
uaccauuccucaugaguuaauuauuagguuggugcaaaaguauuugcgguuuuugcuaauuacuucugcaccaaccuuaauaauuuacaugauaggua

SEQ ID NO: 4199601 - RNA, 72 nt, Human
uaccauuugagagagaacauaaucuuucaucugauuuucuuuuaggaugugugcuuuuuuucaaauaaggua

SEQ ID NO: 4199602 - RNA, 91 nt, Human
uacccacaaaauauccaauuagagaagcuucuuccauuuuagagagacugcuugguaaauggagacuucaaaauggauuugugugcaggua

SEQ ID NO: 4199603 - RNA, 57 nt, Human
uacccagcaaucccuagagguucugauucaauugcuuugugugguggauacugggua

SEQ ID NO: 4199604 - RNA, 58 nt, Human
uacccaggacuuggcaaccucauuugcuaaaagucaaucaugaggacagugcugggua

SEQ ID NO: 4199605 - RNA, 58 nt, Human
uaccccggcuuucaguuggguuugaccaaugauaaacaccagcagaagacugagggug

SEQ ID NO: 4199606 - RNA, 72 nt, Human
uacccuuagguagcugacguuuuagguguuaaaucgaagguuauugaagcauuugcagaugugccuugggug

SEQ ID NO: 4199607 - RNA, 67 nt, Human
uacccuugauagcaucccucaauaacauuacaucauaagaauauucuggguuugcuguacaaaggug

SEQ ID NO: 4199608 - RNA, 73 nt, Human
uaccgaagugugcucaguugaguguuuauacagucauaguuuaaacugauauacacuccacugauacagggua

SEQ ID NO: 4199609 - RNA, 61 nt, Human
uaccgauuucauuaugcucaugcuuaauuuuguuagcaucaagacgaugugaaaucgagua

SEQ ID NO: 4199610 - RNA, 114 nt, Human
uaccuaaaaacaaggauugcuuagugaaaguguuugcauauuuuuaaguuuacagagcuccucagacuuuaaugugcaaaugaaacacuuggagaucuugucaaaaugcaggug

SEQ ID NO: 4199611 - RNA, 68 nt, Human
uaccuccagaaauuuggaugcagcaagucugaaaggaucucuguuuuguuacaaguacucuggaugug

SEQ ID NO: 4199612 - RNA, 87 nt, Human
uaccucugucagcuuccaagguguucugcugguuuucuaaagaaagaaaauuaugcaauuguuuuugguacaguugacuauauggua

SEQ ID NO: 4199613 - RNA, 86 nt, Human
uaccugagagaggacuacaaauacuguuuuauuccaugaucaaucagcugaguguagaaagaaauauauuaccucuuccucaggua

SEQ ID NO: 4199614 - RNA, 85 nt, Human
uaccugcagaauaucuuguauuaguuucccaugcuccauuuuuuucccauggugcugugauaaaugcagaugucaccugcaugua

SEQ ID NO: 4199615 - RNA, 64 nt, Human
uaccugcgaaagagagcacuugugaaauacuaaaguaccugcagcuuuaagcuuucaucaggua

SEQ ID NO: 4199616 - RNA, 61 nt, Human
uaccugcugugugacgggauguuagagaacccaacucuguaucuauuuuaacagcauggug

SEQ ID NO: 4199617 - RNA, 58 nt, Human
uaccugcuuuuuaggcauauggggauuuaaugagcuaauaggugcagagagcauggug

SEQ ID NO: 4199618 - RNA, 60 nt, Human
uaccuggauguuuagauuggcagucauuguuaagacugcaguguuuguggaauucaggug

SEQ ID NO: 4199619 - RNA, 60 nt, Human
uaccuggugcuuacugaaaccauucuaguuugagagcagauggaccauaaacaccaggua

SEQ ID NO: 4199620 - RNA, 71 nt, Human
uaccugguuagaggcuucuugcuugguccucuguaccuauauauagauuaagcagagcccugaacuaggug

SEQ ID NO: 4199621 - RNA, 99 nt, Human
uaccugucccuucuugcaggaauucagccuugggauguggagcugucuccaugcagugcuggagcugauugauucccaacagcaagaucgauacuggug

SEQ ID NO: 4199622 - RNA, 73 nt, Human
uaccuguggaaauguuugcuucaaggucauccuuagauaacaauaugaaguagauaucacuucucucugggua

SEQ ID NO: 4199623 - RNA, 62 nt, Human
uaccuuacaagcuguauguuaccacugucaucugcuugauuugcaagcauccagcuuaggug

SEQ ID NO: 4199624 - RNA, 77 nt, Human
uaccuugaaacaagacagguuacuggcagauggcuuaagaauggaaaauuugccuuggugauuuguaaaaugaggua

SEQ ID NO: 4199625 - RNA, 69 nt, Human
uaccuuggagcuggaggccaaugagacucccuaaucuacaacucaggcugagucucucagcuucaggua

SEQ ID NO: 4199626 - RNA, 82 nt, Human
uaccuuggaucaaagagagaaagccccugcaucccuccaucagauugauagugugagacacuuuuucucuugauuaugggua

SEQ ID NO: 4199627 - RNA, 60 nt, Human
uaccuugugguuuucugcaugcagguuuaagccugcauuuacacuucuaaccacaaggug

SEQ ID NO: 4199628 - RNA, 78 nt, Human
uaccuuugaaaagaaccaucgccuuaugccauaaucuuccucuugcuauuuggcugugguuauuuuuuaggauuggua

SEQ ID NO: 4199629 - RNA, 67 nt, Human
uaccuuugggucaauguucugauucuuuugcagcuucugcucacaagacugagcuugcuugauggua

SEQ ID NO: 4199630 - RNA, 69 nt, Human
uacgaaauacagaacucucaguuguauauaucaaauaauauuugucuguagcugaauucugugaacgua

SEQ ID NO: 4199631 - RNA, 130 nt, Human
uacgcaaagauuuacaaucauuccagguaugcagaguaucaauaauagaggagcuacccagaaauguguuguuucucauugaauauucagugcgugauaugaagauuuaucuuguaaauaucacugggua

SEQ ID NO: 4199632 - RNA, 90 nt, Human
uacgcugggcaggacgacaaacacgagacgccacuguggaaugagcaacuucggagcacggggugacuugcuugggaccgugcccacgug

SEQ ID NO: 4199633 - RNA, 76 nt, Human
uacggaagcccuggcaugcaugucccuggcuuugccauauacaggcaugcugggacugcagcuaagggcaucugug

SEQ ID NO: 4199634 - RNA, 65 nt, Human
uacggguccuggucacauauguucauuuugagaaaaauacauugaacugugcccuaugacuugua

SEQ ID NO: 4199635 - RNA, 60 nt, Human
uacguaguuguuauuacugcauauggucccugggccagugcacaauggaacaacucagug

SEQ ID NO: 4199636 - RNA, 80 nt, Human
uacgucugaaaauaaagaauggaugagaucgugagggucccuugacgauuaggcauuuauucuuuauuugaaaugcagug

SEQ ID NO: 4199637 - RNA, 89 nt, Human
uacgugaauggcccagcagcugguuauaccugugguuucugcuaauuagccugagguugugcuggcugccuccuugggcuuucagagua

SEQ ID NO: 4199638 - RNA, 72 nt, Human
uacuaaauuuucagguuuuacucuccuauuguagaaaguagccugccugggggacuaaggccaaaucuagug

SEQ ID NO: 4199639 - RNA, 71 nt, Human
uacuaaccacaacacuaaaugcugguggggguggagcaacauaaacucucauuuauuguugugggaaugua

SEQ ID NO: 4199640 - RNA, 60 nt, Human
ucaguugcuggaugugcagcucucagaaaggcagaccuugggaguacacucugcagcuga

SEQ ID NO: 4199641 - RNA, 80 nt, Human
ucaguugggcugugcuggugccuccagcugcuucuccugauaggaaggagacacagaagguggcucuaacucugaacugg

SEQ ID NO: 4199642 - RNA, 77 nt, Human
ucaguuuaaccgcauuagugcucuuuuaagcuugaaagagguaguuugagagaguaauugagugguaaacuuacuga

SEQ ID NO: 4199643 - RNA, 60 nt, Human
ucaguuuaggacaguuuucuguaaucuagcuauugcaaauaacuguacugaauauucuga

SEQ ID NO: 4199644 - RNA, 61 nt, Human
ucaguuucagaaucaaaacaucaagcugucacuuuagaaugaacaggauuugugaagcuga

SEQ ID NO: 4199645 - RNA, 73 nt, Human
ucaguuuccucaucuguaaaaugaagaugauaauaauaucugccucauuugagagacugaggacaaaacauga

SEQ ID NO: 4199646 - RNA, 94 nt, Human
ucaguuucuauuugcgaggacuguguaggacaugcauuccagaagggaaaaucaauaaccccugucucugccagcuagcagaauuuggaauuga

SEQ ID NO: 4199647 - RNA, 81 nt, Human
ucaguuugucucugaacaaacugcauucuucacuuuuacuccaguagacagucgaggucagcaguuuuucagccguguuga

SEQ ID NO: 4199648 - RNA, 100 nt, Human
ucaguuuuucauguuccaugcauuggucagggucuuagggagugauucauucuagcagaacucccuggauuuuaaggcagauguuccauuuauuaauuga

SEQ ID NO: 4199649 - RNA, 57 nt, Human
ucauaaaaugcuccugauauugcaggaaacucaguagucuggcagggucuuuaguga

SEQ ID NO: 4199650 - RNA, 62 nt, Human
ucauaaacugucugcaaaacucauacucaccaccuggguguuguguggaaagcaggcuauga

SEQ ID NO: 4199651 - RNA, 62 nt, Human
ucauaaaugcaacaggcugcuuuuuuuuaaaucaucacuagaggcaguugagcauguuauga

SEQ ID NO: 4199652 - RNA, 74 nt, Human
ucauaaggcccaaaauucagagacuaauuguaaauucacauaaucagauuucuagcguuuggccaaucuuguga

SEQ ID NO: 4199653 - RNA, 63 nt, Human
ucauaagggacuuggcuggcaaucaguugaagauacuauuccuuuggcagcaguuccaaguga

SEQ ID NO: 4199654 - RNA, 130 nt, Human
ucauaauauggcuuaauaaaagccuaaaucaagaaacuggugcucccuccuuccucaaggaugcaauccuuagacaaagagugggcuuagauuugguuguaguuuacauuucagucgugguuauuuauga

SEQ ID NO: 4199655 - RNA, 91 nt, Human
ucauaauugccacuuuuucauauaugguguucagaaucaugauaauuauaaagcugaugauggaggccgugauggacguggcugucugugg

SEQ ID NO: 4199656 - RNA, 60 nt, Human
ucauaauuguauacauuuaugggauacaaugugauguuuugauauauguauacaaugugg

SEQ ID NO: 4199657 - RNA, 62 nt, Human
ucauacaauucaaucucugauuuaauggagcuuguaguucaaaggcagagauggauauguga

SEQ ID NO: 4199658 - RNA, 58 nt, Human
ucauacaucuuguauaucuaucugaugauuaucauuggaguagugauuaagagugugg

SEQ ID NO: 4199659 - RNA, 64 nt, Human
ucauacauguuguguucaaaugguggauucugaauuucaguauacuuaugaauaucagguauga

SEQ ID NO: 4199660 - RNA, 76 nt, Human
ucauacccaguuaguuguaaguauucuagagugaaauuuuaaaaaacauuuuaagaaauguaugacugucugguga

SEQ ID NO: 4199661 - RNA, 66 nt, Human
ucauagaaauguggccagaaacaguuuccugagaaauggaugugguuuggccuagauuuuagauga

SEQ ID NO: 4199662 - RNA, 61 nt, Human
ucauagaaguaguauccacauuuccacguaagguggcauccuggguccugcuucuuccuga

SEQ ID NO: 4199663 - RNA, 63 nt, Human
uccauagaauuaggggcuaugccgguuaacauaugagcugagcuguggccaccaauuuaggga

SEQ ID NO: 4199664 - RNA, 60 nt, Human
uccauagacgugaaugccaguuauagcaguaaccugcucauuggcacaccuuuuauugga

SEQ ID NO: 4199665 - RNA, 58 nt, Human
uccauagcuuuggcacuccgcuggcagcaggacgaagccagguaggcaguggcaugga

SEQ ID NO: 4199666 - RNA, 74 nt, Human
uccauaggucuguacccuguccuucugugcucuuagaguuccaggaggccaggagggugcaggcugugucugga

SEQ ID NO: 4199667 - RNA, 79 nt, Human
uccauaucagaaauccugggcaaaguaugcugucuacucuaagauaugguuuagcagaccugucuaggcaagagaugga

SEQ ID NO: 4199668 - RNA, 61 nt, Human
uccaucagauucccuccugagagcugaucucaacagggcauaaggagagaggaucugagga

SEQ ID NO: 4199669 - RNA, 79 nt, Human
uccaucccuuuccugguuaaaauggugcucaaucugcaaguuggcuauuuggccagaagagggucaaaucaacaaggga

SEQ ID NO: 4199670 - RNA, 72 nt, Human
uccaucuagaaucuuaauucugccuuucauguaacauaaaauguucagaaauuaggagaauaaagaugugga

SEQ ID NO: 4199671 - RNA, 70 nt, Human
uccaucuggaccuacuaauugagauaauaggucagggagaccugggucuguauugguagguaugauugga

SEQ ID NO: 4199672 - RNA, 129 nt, Human
uccaucuggguguuaccgcaaagggcaggauggaagucaguguggcccagggcugugucccagcuaguuuaccaaauugaucuucccuagugauucugacaucucuguggagggcuagggugggaauaa

SEQ ID NO: 4199673 - RNA, 80 nt, Human
uccaucuguuaaauauggugucaggugcucaccuucagaaggggcagcugauuagcaucaaggauguuuagcaauaagga

SEQ ID NO: 4199674 - RNA, 130 nt, Human
uccaugacucaguucauguuuccaucaccugcaccgagcuccucauuuggagggugguuuuauuccagugguggagcaaacaacaauccaaugggagcugcgagaagauuuggaagagaauugacguggg

SEQ ID NO: 4199675 - RNA, 55 nt, Human
uccaugagcuagggauucaucaguaaugagacagauguggcucccuuccucagga

SEQ ID NO: 4199676 - RNA, 87 nt, Human
uccaugaguuugcaaugaaguucuagugagaaaugcucuauucauaaagcaggggguuuacguggaccuucuaguguugcuuauggg

SEQ ID NO: 4199677 - RNA, 56 nt, Human
uccaugcuuacuugucucagcagauugagcuuucuguugauuugguaugagcugga

SEQ ID NO: 4199678 - RNA, 66 nt, Human
uccaugcuuugcuaugacucaccagcacugugaauguuacucugcuguagucaaagcaaagcugga

SEQ ID NO: 4199679 - RNA, 60 nt, Human
uccauggagauggaugacuguaaccuguuggaaccucaguuuucucaucugcaaaaugga

SEQ ID NO: 4199680 - RNA, 56 nt, Human
uccauggcuccauccuguugcuaguggcaaugcuacgagcuggaaggaggccugga

SEQ ID NO: 4199681 - RNA, 63 nt, Human
uccauggggcaagagaggaagcaguccaccugaugugggcagggaucucuuuugcaaguguga

SEQ ID NO: 4199682 - RNA, 78 nt, Human
uccauguacguauauaugcaugcccauguauacacauacagacauguguauacauacauauguguguguauaaaugga

SEQ ID NO: 4199683 - RNA, 72 nt, Human
uccauguccuuuaguguucuaagaacauccaugcaggcuuuggcccgucugggauuggaaacugggauugga

SEQ ID NO: 4199684 - RNA, 60 nt, Human
uccaugugacgguggcaguuuuugggugaaaauauuuugucagcggcucuaacauaugga

SEQ ID NO: 4199685 - RNA, 66 nt, Human
uccauguugagaaugcuauaaugccaguuuuuaaaagauguaauuaugcucagcauuccagcugga

SEQ ID NO: 4199686 - RNA, 111 nt, Human
uccauuaauuucaagggacacaauucaaugcauaccaugucaucuuuguuuaguccaacaauaaauagggaugagcaacugguaguggaggugagacgggugaggagugga

SEQ ID NO: 4199687 - RNA, 110 nt, Human
uccauuauuucugucaagaagacaauuccaaauguugauuaguguuuagacuuacugauuaucagucaagcuaauugauccacaaaaucuaucuugcagaguuucaagga

SEQ ID NO: 4199688 - RNA, 82 nt, Human
uccauucagcaauacuauagccuuucagagcucaugaauuaaagacaugggcaauguagauucuguagauucagugugugga

SEQ ID NO: 4199689 - RNA, 101 nt, Human
uccauuccuuucagccuucuaagaauugaugugaauugcagccagaucaauuuggcuguggcgauugguaucgauuguguagaugggcaaaaaagaaugga

SEQ ID NO: 4199690 - RNA, 60 nt, Human
uccauucucaaggugaagcuaugaauaagaguguugucauuuggaagccugagaguguga

SEQ ID NO: 4199691 - RNA, 63 nt, Human
uccauugcaaagcaauguaggucagcuucuaaacaaguaagccugaaaguaauuguuuaugga

SEQ ID NO: 4199692 - RNA, 114 nt, Human
uccauuucauaaagaagaaaacauagauuuuagguuagaucgacccagauuugaaaccuacuagcugggucgcucuaaccuaaaaucuauacuuuucuuuaaagaauaaaugga

SEQ ID NO: 4199693 - RNA, 74 nt, Human
uccauuuccuucggacaguuuggguuugguuuucuuuuaccugagacucaaagacccugaaugcuagaaauggg

SEQ ID NO: 4199694 - RNA, 109 nt, Human
uccauuucuagaaagacucugacagaccaaguuuccagcagguguggcaaaugcaugucaucuuggauugacuggcucugccuacccagagugcuguuuggauaaagga

SEQ ID NO: 4199695 - RNA, 125 nt, Human
uccauuucuagguuguuguuggcugugucaccuugggaaaguuguugaacacauugagucaaauugagagagacaucaauucagcauuuuaaggaauagauacaguuaucaaguuaccuaaugga

SEQ ID NO: 4199696 - RNA, 107 nt, Human
uccauuuuuaucugaaauaugauucuucugagcuuuauagcccuauuacaugauauccuaucacaugaaaugcuguaaagaagaaugagaucauguaggugaaagga

SEQ ID NO: 4199697 - RNA, 62 nt, Human
uccauuuuucaugacuccucaagcuagucauaaacuccauagaaaggaacaugaacaaugga

SEQ ID NO: 4199698 - RNA, 71 nt, Human
uacuaauacauaauaucuccgauuacuugcagguuguucucuccugacaggcguugggguguugguuagug

SEQ ID NO: 4199699 - RNA, 77 nt, Human
uacuaauggcagccuuuaagcuuggauagguggguaauagugcuugaccaaucugcuuaaaugcugacuguagagua

SEQ ID NO: 4199700 - RNA, 78 nt, Human
uacuacaugaaacugaaggacaaccagaagaacuggaagcgcuaugaccuucugaauguccuugaguucaaccaggug

SEQ ID NO: 4199701 - RNA, 63 nt, Human
uacuagaucagggauuuguaauauggccucugagccaaauccaaucuauccucugauuuugua

SEQ ID NO: 4199702 - RNA, 87 nt, Human
uacuaggaaaaacaagguguuaugaugucuugauaaacauuugguaagauaggagucuuguuacacauaauaacauuuuucugagua

SEQ ID NO: 4199703 - RNA, 56 nt, Human
uacuaggaaugggcuaucccaagcugcaacaccuuggaaaugcccauugccucgua

SEQ ID NO: 4199704 - RNA, 67 nt, Human
uacuaggaauggugcucagcagaaauccugcaacauauggaucuguuuacacacuauucacugugua

SEQ ID NO: 4199705 - RNA, 75 nt, Human
uacuaguuucuaccuuacagaaaguaucauagaaaauaucaaauaaauacuuucaugugagcauggaaugaggua

SEQ ID NO: 4199706 - RNA, 60 nt, Human
uacuauaauauaauuuuucccuuugccuuugcugguauuggagaaggacaauguugagua

SEQ ID NO: 4199707 - RNA, 91 nt, Human
uacuauagcuauaagguaugccuaacauuggauagagugauuucuccuccuuaaucguuuuucaguggucuuaggucuucuagguguagug

SEQ ID NO: 4199708 - RNA, 88 nt, Human
uacuauccuacugucauuuuuuuagaacaccuguauuuuuacauaagauuuauuuuaggggauguuugccaaugauuuuuagguagug

SEQ ID NO: 4199709 - RNA, 89 nt, Human
uacuaucugauaugacacaguguaguuaaugugacauuuauaaaaacaaauguccuguuaaauagauuguauuagucauccagauagug

SEQ ID NO: 4199710 - RNA, 114 nt, Human
uacuauuuacaagauuuuauuugcuucauuuuaaauaaagacaauuuuauacagaaaagacguugguaauagugaagugaaguuaauuguaagaauuuuucuuugcaaauagug

SEQ ID NO: 4199711 - RNA, 94 nt, Human
uacuauuuucaaauagcaaagaaggguucuucauuagguugucaaaucuaauuuugugugagcuuuaucuucacucugcuguuuuaaaguagua

SEQ ID NO: 4199712 - RNA, 84 nt, Human
uacucaaacuuuacaauggauaaggaaaauuggguuguauguaaaaauacauuauccugucuuuguccuuguagacuuagggua

SEQ ID NO: 4199713 - RNA, 103 nt, Human
uacucaccccuuggagaccuguuuguuauuuauaacagugagaacgggggaccuagugccucccuccuggugaugaugcaaauggucaaggagauagugagug

SEQ ID NO: 4199714 - RNA, 67 nt, Human
uacucccuuguugcagcugacagauacauauaccuaaguguaugugucccuugguguagcaacagua

SEQ ID NO: 4199715 - RNA, 84 nt, Human
uacucguuuuucaggagggcugcuggugacucagacccgguguggcugggccuggcucugagggagcuccugagagccugagua

SEQ ID NO: 4199716 - RNA, 59 nt, Human
uacucugcucauuggaguguguucuucauguucacgcacaaguuuucaggagcauagug

SEQ ID NO: 4199717 - RNA, 72 nt, Human
uacugaaugaaugaauuaauagaguauguaguuuuuuucugccuugggcucucuccauuuauuugcacagua

SEQ ID NO: 4199718 - RNA, 70 nt, Human
uacugacuccugggucccaucccaggccauuuacaccaaaaucucuggggguagaacucaggcaucagua

SEQ ID NO: 4199719 - RNA, 67 nt, Human
uacugagaauucuagucugacagugcuacauuguguagcacauuguugaccagaaggaauuuuagug

SEQ ID NO: 4199720 - RNA, 96 nt, Human
uacugaggaagcagcagacgucauuaugugcguacauguaucuguguguuauaugugcauguauguauguacauauguaaucuaauucccucagua

SEQ ID NO: 4199721 - RNA, 66 nt, Human
uacugauaaacagugcuuugaccaggggccuccaggccugagacugaaggcacaguuuaaccagua

SEQ ID NO: 4199722 - RNA, 66 nt, Human
uacugauaugaugugcuuuagaggauaagcagggcaagaaugcuuugaucugaauauuaugcagug

SEQ ID NO: 4199723 - RNA, 66 nt, Human
uacugaucaggggccccuguagacuguaagauguuagaucgccaggagccagcccuguucucagua

SEQ ID NO: 4199724 - RNA, 69 nt, Human
uacugaucuaaauggcugugcuaaaaugaguguuucacgacacucauuuuauaacacuguaguuuagua

SEQ ID NO: 4199725 - RNA, 92 nt, Human
uacugaugauuacuuguuuugauaagaugcugagugcauugacuuaguaccuguguuaauugcuuuauccuguuagaaucugauuuucagug

SEQ ID NO: 4199726 - RNA, 77 nt, Human
uacugcccuaagguaauuugcuagaaauggaguggucaagauguauugauuaacguuuuaggcauacuucuguagua

SEQ ID NO: 4199727 - RNA, 58 nt, Human
uacugccuucuuuaauccuaguuuuacucuucuuaacaagucuaagagaauggcagug

SEQ ID NO: 4199728 - RNA, 65 nt, Human
uacugcgaaaugcauaaucuuaguagauuucuuuccugagauguuacugucugugguuuccagua

SEQ ID NO: 4199729 - RNA, 67 nt, Human
uacuggaguuuuucaagaaacuguuuaaguucacuuuaacuuacagaaguauugagagauccaagug

SEQ ID NO: 4199730 - RNA, 60 nt, Human
uacuggcuaugucccaaaugcuacgucaguagcagagcugcaauauagaccccaaaagua

SEQ ID NO: 4199731 - RNA, 87 nt, Human
uacuggguuaauguuaucugaagacaguuuuuuugugguuuaauugagucaugguucauugucuuuuauugcauguuaaugccagug

SEQ ID NO: 4199732 - RNA, 94 nt, Human
uacugguuggcagucguuugcagaguaccugaagaggacaguaaaauacacaaaagaaugcugugcugguagucugcaaaucagagcaccagua

SEQ ID NO: 4199733 - RNA, 73 nt, Human
uacugguuuagagaauuuuaaaagccuugaauaaguaaaauucagggaaaagguaaaauucuaggaaagagua

SEQ ID NO: 4199734 - RNA, 86 nt, Human
uacuguaugaauuguauuguauuauuuuagagaccuccugugaauggaggucucuaaaauagucaaacucauagaagcagacagua

SEQ ID NO: 4199735 - RNA, 58 nt, Human
uccuaggguaaucagcauacauuguagccuuuaagauaugugguugucuguccugggg

SEQ ID NO: 4199736 - RNA, 57 nt, Human
uccuagucaccugaaucaugcaaagaaauuccgcuuuccaggagcacgggacuagga

SEQ ID NO: 4199737 - RNA, 68 nt, Human
uccuagucuguagucacacaggugacagcugggguugcaucuguuccuugccuacaggugaacuggga

SEQ ID NO: 4199738 - RNA, 109 nt, Human
uccuauaaacuccugaaaccagccucuagauaaggauuucucaacuucggaacuauggacauugggguuaauuauucguuguugggaggcugucauagacauuauagga

SEQ ID NO: 4199739 - RNA, 114 nt, Human
uccuauaacuuuucuucauguggguuucuaccgaauauaaauacugaguuuggaauuuggcuucaagucguauauuugggagggaacagcaggucacauagugaaggcaugggg

SEQ ID NO: 4199740 - RNA, 89 nt, Human
uccuauaaggauucuuacgagccuuaugcaggcacuugccuaaguaccugcauaaucccaggcuugcauucaaagcaguccuuagauga

SEQ ID NO: 4199741 - RNA, 69 nt, Human
uccuaugaaaauuuccaucaguuauaugggauuuuaauucugauauucuugaagggagauuauaaagga

SEQ ID NO: 4199742 - RNA, 63 nt, Human
uccuauucuuuguccuguugagagcuggcaccagcagcaguggcaaugggacagagcacagga

SEQ ID NO: 4199743 - RNA, 94 nt, Human
uccuauuucuuuguuaaggaguauugcuucuccaaaaagggcucuaacaaccucagagauugcaauuccuuacaugcaauggaaugccaaugga

SEQ ID NO: 4199744 - RNA, 59 nt, Human
uccucaaaggauacccaggcuucauuuacaggcaagaagccagagggaaucuuugggga

SEQ ID NO: 4199745 - RNA, 78 nt, Human
uccucaauuucuucucugccuugaggcaauugcuuacuuugagaacauuuugccagcuagagaagcuagaaaggagga

SEQ ID NO: 4199746 - RNA, 61 nt, Human
uccucacaagcaagcacagguagugggcuccaggagccgaggcagagcuguucugugggga

SEQ ID NO: 4199747 - RNA, 73 nt, Human
uccucacauguagauuuuuuuagaucauagaaucaaucuacuucugggccuauagaagucuacccauuaagga

SEQ ID NO: 4199748 - RNA, 56 nt, Human
uccucacugugaccauagguggguacuguuauuuguuugcauuuuacaugugggga

SEQ ID NO: 4199749 - RNA, 57 nt, Human
uccucagaauggauggcagggguugcaaaccaugugccugccuuccaugcugaguga

SEQ ID NO: 4199750 - RNA, 57 nt, Human
uccucagacuucccuuuguguagagccucaaggucagccagaggugagaguuuaggg

SEQ ID NO: 4199751 - RNA, 90 nt, Human
uccucagauuccugucaauaccauuucauucuuuccucauuuugggagaagggaaggagggaaggaaguaaggaaggaaggaaggaagga

SEQ ID NO: 4199752 - RNA, 74 nt, Human
uccucagcugugaaauguggauguuaauaguagcuacuuccuagaguuuguugauuaaacacaucauguaagga

SEQ ID NO: 4199753 - RNA, 57 nt, Human
uccucagucucucaaaugaggcagauauuauuaucaucuucauuuuacagaugagga

SEQ ID NO: 4199754 - RNA, 63 nt, Human
uccucaguuauaaauaggaaacaccucuaaucuugagggaaaccauuucuguguaacugaaga

SEQ ID NO: 4199755 - RNA, 55 nt, Human
uccucaucuguaccuugggguaaaaauucccacaccccagggguuguggugagga

SEQ ID NO: 4199756 - RNA, 63 nt, Human
uccucauggugauuuucaucucugcauucccaagcguguagaugaagggguucagcauggggg

SEQ ID NO: 4199757 - RNA, 77 nt, Human
uccucauuuguaggaagggcucagggcucgguggguaagccagacacugagcuagguccuucuugcccagcugggga

SEQ ID NO: 4199758 - RNA, 56 nt, Human
uccuccaagcagaggcccugaagugacugcauuuugagucucugaaauuuggaaga

SEQ ID NO: 4199759 - RNA, 67 nt, Human
uccuccagcagcagggaggggaggacuggcugucucagaaucuuuuaaaagcccugcugucugagga

SEQ ID NO: 4199760 - RNA, 82 nt, Human
uccuccagccuccuaucugcuuuaucugagacaagucaaguguguguggcaguuggggaugaagugaggagaguugagggga

SEQ ID NO: 4199761 - RNA, 76 nt, Human
uccuccaugcacugccccucugcaccucccagaagauuaggguggggguggagugggagcgguggaucuuuuagga

SEQ ID NO: 4199762 - RNA, 58 nt, Human
uccucccacaagggccagcucaccuggucgccccaaagaccucccucuguggguggga

SEQ ID NO: 4199763 - RNA, 104 nt, Human
uccucccagaaccaaaugaagaaacugaggcuuagagaagaugggauuuuucagcuaaaagaucuuucucuugaacucuaaagcccaggcauguucuggcaggg

SEQ ID NO: 4199764 - RNA, 73 nt, Human
uccucccccagcccaugcccuuauagcauaaccggauuagcuggcugggcugugggcuguugcagggguaggg

SEQ ID NO: 4199765 - RNA, 99 nt, Human
uccucccccuccucccaggagcgcugccuccugccgugcagcuuccuccuccuaggugggacuuguggguagguggcugaugaaggaggaggaggagga

SEQ ID NO: 4199766 - RNA, 71 nt, Human
uccuccccgcgcugccagacucacucggagccaccaacgaccugggaggugauggcaagcagcggguugga

SEQ ID NO: 4199767 - RNA, 128 nt, Human
uccuccuugcgcugguccuggccacugaugacguagcagagcgcgcgcacgcgcuggaagaacuccucauccaccaggugggcgcugcucccgcugggcagguaggccagguccagguagaccgggga

SEQ ID NO: 4199768 - RNA, 56 nt, Human
uccuccuuguucuuuugccuacauugauaaguguugggguugggggugcaggaggg

SEQ ID NO: 4199769 - RNA, 66 nt, Human
uccucgcacagugggacccaagaugcauuugggcacagcaggagggaauguccuggugugugagga

SEQ ID NO: 4199770 - RNA, 80 nt, Human
uccucuagaagccccuggaaacuaacaacagagcagagccaucugccauguuucuuauuugcaguuucagggcuuuggga

SEQ ID NO: 4199771 - RNA, 67 nt, Human
uccucuagugugcaacugauauuauaaacaugcuuuuaaaggaauuucauuguugcaugguaggggg

SEQ ID NO: 4199772 - RNA, 85 nt, Human
uccucucaaagcaguuccuuuuaguacucauagcuucaaacugcugucuugguaauuguguuuauuaaaugaauuagugagugga

SEQ ID NO: 4199773 - RNA, 60 nt, Human
uccucucaaauguaauuugagguucauuuuugacccucauuuagcguuuuagauucugga

SEQ ID NO: 4199774 - RNA, 59 nt, Human
uccucuccagccacagaagcugcuccugcaaggagugcaaacauuuucuccuggaagga

SEQ ID NO: 4199775 - RNA, 67 nt, Human
uccucucuucucucuugauaaacgccgaaucuuacgugccugacucuguuuaagagcugaaagggga

SEQ ID NO: 4199776 - RNA, 64 nt, Human
uccucucuuucauuggucgccuuggaggccgcucgccuccggcgcgggcacagagaggggcggg

SEQ ID NO: 4199777 - RNA, 58 nt, Human
uccucugaaauuggcccucagcaggucacuaugccaugaugauaggaguuuuagggga

SEQ ID NO: 4199778 - RNA, 96 nt, Human
uccucugcaguuguuacaaaggucauaaaagugugcuagguguuuauccaggaagaaaauauauuuuuauucuuuuuuaauaacaggagcagggga

SEQ ID NO: 4199779 - RNA, 61 nt, Human
uccucugcucagcauuccucaccagguacucauuaggcaaugaggaugugcagcagcagga

SEQ ID NO: 4199780 - RNA, 82 nt, Human
uccucugcuggccuccuccucugucugcaugcgugcguccuugcaagggaaagacgcagcacaaaggaaaggaucaggagga

SEQ ID NO: 4199781 - RNA, 70 nt, Human
uccggugccugguuuggggaauguucgugggauauguuccaaaggacugacggaccuaucagguacugga

SEQ ID NO: 4199782 - RNA, 130 nt, Human
uccgguuuccuagggagcucugcugaagcagcccagccuccguggguccaucugucagggaggcuguuccgccccaucgauugcuguucccagggggcugugcugcucgagggacccaauguggccgcca

SEQ ID NO: 4199783 - RNA, 68 nt, Human
uccguaguaugauuucugagcucccuuguucuccuucuucaagggagcagagcucuucaucugcaggg

SEQ ID NO: 4199784 - RNA, 95 nt, Human
uccguauagagagaaacaguguugcuaaguucugaacuaguuauacuguaaaauggguuuaacagaguaggaacccuguuuuucaccuguaagga

SEQ ID NO: 4199785 - RNA, 58 nt, Human
uccgugcuccuuccucauccugugcaucccucugaugguagaggaggaggcagcagga

SEQ ID NO: 4199786 - RNA, 58 nt, Human
uccuaaaaguaaucaaacauuuguggguucacaucacgcuauguucauauuuuuaggg

SEQ ID NO: 4199787 - RNA, 113 nt, Human
uccuaaaaucccuaauucuuuaaaacugccuguguuucauuauaaaaaguuggcuuuguguaauuacaccgagccauacaaccuauaaagugaaaauacugcagauuuuagga

SEQ ID NO: 4199788 - RNA, 72 nt, Human
uccuaaagacaaugcauugugauugugaccagaaggaaacuuaaguccaaguccucagugaauuaucuggga

SEQ ID NO: 4199789 - RNA, 71 nt, Human
uccuaacuccuggcuguaugcuggccucagagcuacacugcucagauggagcaugugagccccuuauggga

SEQ ID NO: 4199790 - RNA, 59 nt, Human
uccuaacuuggcuguaaaaucagaggcuuggcauagccuuagauguaaauaccaaggga

SEQ ID NO: 4199791 - RNA, 83 nt, Human
uccuaagauagagaaugagggacuaucauaaaagaauuauugcucagggauacuucuucaaaguccuuauuccuuucuugaga

SEQ ID NO: 4199792 - RNA, 55 nt, Human
uccuaaggagauuguuaaagcuauaugaaaaauguaagcuaaaaaucuccuugga

SEQ ID NO: 4199793 - RNA, 79 nt, Human
uccuaaguguaauaaugcauauucuuuuucggaugcuuauaauaugguguugguaaauagcuuagcaaugcacauagga

SEQ ID NO: 4199794 - RNA, 68 nt, Human
uccuaauggcaguaacagaggguuugcagauaugcucauugacagcauggcaggguccuguuacagga

SEQ ID NO: 4199795 - RNA, 76 nt, Human
uccuaauuaugacuuguagaugauaauuucuagauacucuccuacuagaaaugaauguuuaaaaguccuaagagga

SEQ ID NO: 4199796 - RNA, 110 nt, Human
uccuaauuuugcaaauagcuugauuccaucauguuuuaauuagcaaacugauuauauucaagagauuggugaaugaaaaguagauuaagaucagugcagcagaauuggga

SEQ ID NO: 4199797 - RNA, 82 nt, Human
uccuacacauguccuuuuauuuaaagcaggcaaagucagaauuagcugaauaguccuguccuaaggaaaggagcaguguuga

SEQ ID NO: 4199798 - RNA, 66 nt, Human
uccuacauuuguucaaauaagcugagaaauccuugguacucaguaugucuacuggacaaaguugga

SEQ ID NO: 4199799 - RNA, 83 nt, Human
uccuaccagacugugccagcccugggagacuuauggaaagacacuuugaucacaggagcccaggggagcuguagcaaguggga

SEQ ID NO: 4199800 - RNA, 61 nt, Human
uccuacgaaggcuucucacuuugguuuucccuaaaaccaggacauuuuagucaucuuagga

SEQ ID NO: 4199801 - RNA, 92 nt, Human
uccuacuccuaccucuacucccugccacugcaccuguaucaguuuuaguuuugcugagguuucaggaguggcaggggagaguagguacagga

SEQ ID NO: 4199802 - RNA, 106 nt, Human
uccuagaaaaaaagaaauugaaaacugcagggaaaguguuggcagcaucccagacuuucuuguuuugcugcuaaucacucugacagcggauuucuuuuucagagga

SEQ ID NO: 4199803 - RNA, 62 nt, Human
uccuagaaggaucauucuaguggcuauccuacagccacuugagaggauuguccuaguuggga

SEQ ID NO: 4199804 - RNA, 130 nt, Human
uccuagcuacacuaauauuuauagaauguugauauuggaugggccuuggagagcacauaauucaaauuuuuaguuuucagagaggcaauacuguuuaauauaaagaguuuuggcaaccagguggcaaaaa

SEQ ID NO: 4199805 - RNA, 122 nt, Human
uccuaggcaaaaguuuucacacuguuuucagucaguucuauguaguuauaauagaaugaaucuuccuaauuuaagucauagaaugauaaaagcagugaugaaaagagaauguacaccuagga

SEQ ID NO: 4199806 - RNA, 57 nt, Human
uccuaggcuaaagcuccggcucuggguggaccagagacaaggagcuggaguccaggg

SEQ ID NO: 4199807 - RNA, 130 nt, Human
uccuaguuacccagaaguaauuaugaaccaacucucgggccaacugggucuguccucugaugcuaucaaagucauauagguaggauucagcuucgugguuggcuaguaauuaaaaagcugcaagcuguga

SEQ ID NO: 4199808 - RNA, 73 nt, Human
uaguuuggugcauaaguaauugcagcaauuugccaauaauggcaaaacccgcaauuacuuuugcacuagccua

SEQ ID NO: 4199809 - RNA, 72 nt, Human
uaguuuguacacaaauaauaaaguuacauacuauuaguguguugugaaagaaaaguauuugugucuaaauua

SEQ ID NO: 4199810 - RNA, 83 nt, Human
uaguuuguucccaaaugcucacccaugugcuagguguacaaagccaucacagcaaugacuaaggcacuuugggaaugaugcua

SEQ ID NO: 4199811 - RNA, 65 nt, Human
uaguuuuacauuaucuuaggugcgugguuuuuauuaaucauccacuucacuggaauguaggucug

SEQ ID NO: 4199812 - RNA, 68 nt, Human
uaguuuuacuuaucuuuugguuaucacaguuaaaacaaacuaugcuaacugggggaaaagagauccug

SEQ ID NO: 4199813 - RNA, 74 nt, Human
uaguuuuaucuguuguacauuuaugcugauaacccuuuauuagguuagaugcagaaaguauauagauauaauug

SEQ ID NO: 4199814 - RNA, 129 nt, Human
uaguuuuaugugucaacuugacuaggcuauaguacccagauauucaaccaaacacuaauccaggugugcugagaagguauuuugugaauaugguuaauaccuaaaaucaguugacuuuaaguaaagaag

SEQ ID NO: 4199815 - RNA, 74 nt, Human
uaguuuucucgaggaaauauuuacaacugauugaauuuaauuucaauuguacuaauuuuccaugaguugagcua

SEQ ID NO: 4199816 - RNA, 130 nt, Human
uaguuuucuucccuguccgacacccugcucugugauucucuggggacuucaaaaguaaguaggugcaguucaugagcuuuggggaagaauacagaaaagugggucaugggcagugagaagcugaaaauua

SEQ ID NO: 4199817 - RNA, 72 nt, Human
uaguuuucuuuccacuccccgucaguugugagguauaugacugcaggcacuggagucugaggaagaaaacug

SEQ ID NO: 4199818 - RNA, 79 nt, Human
uauaaaaacagguggcuuauuagggucaguggaacauaauucaaaggcugaauuauuaauaugcuacaucuuuuuuaua

SEQ ID NO: 4199819 - RNA, 72 nt, Human
uauaaaaaggagagcaaggguagggacacuuuuuccuccuuaaagacuuguccccuuucuuuccuucguaug

SEQ ID NO: 4199820 - RNA, 82 nt, Human
uauaaagaacagacugucguagaaaacugucuuugcuuccaaaucagcagaggaccauuguauguauugucaggucuuuaua

SEQ ID NO: 4199821 - RNA, 67 nt, Human
uauaaggguugaacauugcuuauaauauacccauaauaggguagaagaagcauggucaaaacuuaug

SEQ ID NO: 4199822 - RNA, 64 nt, Human
uauaaguagaaagaguugggaggaauuuuaguuggguuucauucuucuaaacucuauacuggua

SEQ ID NO: 4199823 - RNA, 114 nt, Human
uauaaugaugaaguaagugcagacauguguucuaacaggagcuuugcaggaagacaaagcaaauccauuucuagaauaaguguuucccaguaagaaaaagaaauucucucuaua

SEQ ID NO: 4199824 - RNA, 71 nt, Human
uauacaaugaguacauucuggggaucuaauguacagcauguugacuauaauuaaugauacuacauuguaua

SEQ ID NO: 4199825 - RNA, 56 nt, Human
uauacacaaacaagggguuaaguucagagacuauaauccuauuuuguguguguaug

SEQ ID NO: 4199826 - RNA, 64 nt, Human
uauacacauuacaguuucaggagcacugggcuagucccaugguuuucagacuuuaaugugugug

SEQ ID NO: 4199827 - RNA, 65 nt, Human
uauacaggaaauuuuggaacagugagagaugaaaccaaggagcauugauucgagauuuuugugua

SEQ ID NO: 4199828 - RNA, 57 nt, Human
uauacagggcaagcgaaggcagagcucaugcuccacagcuuugcaaagcccugugua

SEQ ID NO: 4199829 - RNA, 83 nt, Human
uauaccccauaaguagugcugagcuccagcuuagcugagccaagcucaguccuuaucugguguucagccagugcacagguaua

SEQ ID NO: 4199830 - RNA, 60 nt, Human
uauaccugucaaaagacauggagaucagcagcacaaucucagucccauugaagaggugua

SEQ ID NO: 4199831 - RNA, 64 nt, Human
uauaccuugcuaaauuguuuucuagaaagcuugaaccaaguucugcacauuuuagcaaaguaug

SEQ ID NO: 4199832 - RNA, 63 nt, Human
uauacgagggacauuaaaggcacuguuaggauuugaugacagcugccaagaaucuuuucuaua

SEQ ID NO: 4199833 - RNA, 61 nt, Human
uauacuauuuuccacuugucacgcuuuuaaccauuagaagaggaggaggaaaacuagugua

SEQ ID NO: 4199834 - RNA, 101 nt, Human
uauacucuugcuggcaguguaugaacauguucauugacuuaccaacacuauacuaaucugguagguaugucucauuguucgugugugugugugugugugug

SEQ ID NO: 4199835 - RNA, 95 nt, Human
uauacuguauuuauuucauccucucuguuuucguguaugugcugaaaugcauaucuugaucaaguagaagaggauaugauauauaaauacguaua

SEQ ID NO: 4199836 - RNA, 111 nt, Human
uauacuuuaaguucuaggguacaugugcacaaugugcagguuuguuacauauguauacacgugccauguuggugugcuguacccauuaacuugucauucauauuagguaua

SEQ ID NO: 4199837 - RNA, 61 nt, Human
uccauccuuuacauccuucugucuguucaagaaccagucugggaucuuguacuggcgugga

SEQ ID NO: 4199838 - RNA, 129 nt, Human
uccaucuuucccucaguguccugugggcaagugucccagccccacaggccugugaaaaggcaccagccccucucccaccggccuguggggcugggacacuugcccacaggaccccgagggaaaggcaag

SEQ ID NO: 4199839 - RNA, 56 nt, Human
uccaugagacagauacuguaagguaaauuuauccuuaagccuaucuguaacaugga

SEQ ID NO: 4199840 - RNA, 55 nt, Human
uccaugaggauuggaaauacgucugcuguguucauugcagucccaaaccuuagga

SEQ ID NO: 4199841 - RNA, 106 nt, Human
uccaugcuuuauuccuuuggggcucagcaggcuguuuucaucuugccuggugaaacaaauguguggcagugugggagagcucauaaggaacagucugaaaugugga

SEQ ID NO: 4199842 - RNA, 55 nt, Human
uccaugggaaugcuguggccacaccuggggcguuggcuacagacauuccuaggga

SEQ ID NO: 4199843 - RNA, 75 nt, Human
uccaugggccaguaaugcuggagguuuguuagaaacgcaacuuccaggccuuccuucccagccuacugguuugga

SEQ ID NO: 4199844 - RNA, 87 nt, Human
uccaugguaguuacuugcacacuuucagguccucuuugcuacucuaagguaauaugcaaauuugaagauguugcuugacucaaugga

SEQ ID NO: 4199845 - RNA, 89 nt, Human
uccauguaagguucaagaacauuucagcaaauaagaacagcauuuucauucuguuucuuuugaguuucugaaugaucugaacauaugga

SEQ ID NO: 4199846 - RNA, 81 nt, Human
uccauuagcauaguuacaaacuugagauccuuugucuuugguagaacuuaaagauaaugucaaauucugucugcuacugga

SEQ ID NO: 4199847 - RNA, 129 nt, Human
uccauuaguacugugucuguuucuucugaccaguguauccccaguagcuagcuuaaaugccuauccauucuuuauuuauuuacagugugccuacuauaugccagauguuauagauaauagaaaaaugga

SEQ ID NO: 4199848 - RNA, 84 nt, Human
uccauuaugccauuugauuuucaugauaaacuugugaagugauacuauccuccauuucacagaugagaaaucugaggcauggga

SEQ ID NO: 4199849 - RNA, 62 nt, Human
uccauuccuuguauaucuacaugcaggaucccaacugcauucaaugugccagggaaaaggga

SEQ ID NO: 4199850 - RNA, 63 nt, Human
uccauucucauucccccaggcacuccaguaaaugcaauacagauguggcaggaugagggcgga

SEQ ID NO: 4199851 - RNA, 75 nt, Human
uccauucuucuguaucucuguguuucuugaucuaauucugggaauccaggauccacaugagacuggagaggggga

SEQ ID NO: 4199852 - RNA, 67 nt, Human
uccauugauacuauuaagcacugggcuaggaaugacuagccuaagaucacuuauagagucacaugga

SEQ ID NO: 4199853 - RNA, 72 nt, Human
uccauuggagucggcuuuccaggaaacccccugcaccacuguaguacaggcaggaguuccuggacuccagga

SEQ ID NO: 4199854 - RNA, 80 nt, Human
uccauuggccugcugggucucuggguguaacaagaggcaaagacucaggugucuuggacacugagacuagcaagcaggga

SEQ ID NO: 4199855 - RNA, 102 nt, Human
uccauuugcauaaggcaugaaaaacugguuaggacugggugugccaugcauagugcacgaaaaggcuggccacccacccuaaucuuucauuaagcagauggg

SEQ ID NO: 4199856 - RNA, 56 nt, Human
uccauuuggcacucuauuuccauaaugcgauuccgcagcguacgggcgucagagga

SEQ ID NO: 4199857 - RNA, 84 nt, Human
uccauuugguaaacgcauuauaucccucugugauaucuugaauauucauauauguauuagagcauauaauuugacuuaugugga

SEQ ID NO: 4199858 - RNA, 66 nt, Human
uccauuuucauagcucucaguuugggauucacgagccuauuguguuacugagcugcauggagagga

SEQ ID NO: 4199859 - RNA, 69 nt, Human
uccauuuuccugcuucuacuucacuuccuagaauaauucgggaaaugguagaguaggaagauuucugga

SEQ ID NO: 4199860 - RNA, 60 nt, Human
uccauuuucuaaguaucacuuauauacacaauguauuaucaggugauccaggaaaacgga

SEQ ID NO: 4199861 - RNA, 88 nt, Human
uccauuuuuuuccauuauacuuuguguucaacguaguagauuacacguaaagacagcaagauacaaaauauaaauggagagaaauaga

SEQ ID NO: 4199862 - RNA, 65 nt, Human
ucccaaagugcuggaauuacaggugugagccacugcgccuggcccccaguacuuugucaaaugga

SEQ ID NO: 4199863 - RNA, 62 nt, Human
ucccaaauggauacaggcaaacauuuccuuaacaaagucaaugugcuguauucauuucugga

SEQ ID NO: 4199864 - RNA, 81 nt, Human
ucccaacaguuuagaaugccacauaguucauacucauggaaguagaguacuauauuuggcauuuuauauugucuuauggga

SEQ ID NO: 4199865 - RNA, 76 nt, Human
ucccaaccaccgugcagcuucccugagcccacucccuggcccagcucagagcccgaggcuugcauguuuguuggga

SEQ ID NO: 4199866 - RNA, 62 nt, Human
ucccaaccccagacaccgccucggggccugagcccuugagagccacuccuggggcccuggga

SEQ ID NO: 4199867 - RNA, 68 nt, Human
ucccaagccccaccuucggcugacucuaaggagaaccacagggucaggccucaaggugggcucaggga

SEQ ID NO: 4199868 - RNA, 63 nt, Human
ucccaagcccuggaugccucagcaaggauugucagaaaugucugagaugaucagagcuaggga

SEQ ID NO: 4199869 - RNA, 56 nt, Human
ucccaaguguuuaaaaauggaaaugcauuacuucugugcagcucagacauuugggg

SEQ ID NO: 4199870 - RNA, 86 nt, Human
ucccaaucauaagacccagccaguauuuuuacuacauuuccucuccucaucuguuuguauugguuugguuugguuuaugagugggg

SEQ ID NO: 4199871 - RNA, 68 nt, Human
ucccaauuucucgaacucuaauccaggaccuuaguacucagucuggagaugggucagggaaaaugaga

SEQ ID NO: 4199872 - RNA, 69 nt, Human
ucccacaagaaaccuaaguaacuuuugucuaucaguuucugggaaaggucugcuuguuuucuugaggga

SEQ ID NO: 4199873 - RNA, 106 nt, Human
ucccaccaaaggggcaauugaugcugaugccugccagaagcacugcuucaaguuccaguguuuacccauauuagcaucaagucugccacuauucauuuuggaggga

SEQ ID NO: 4199874 - RNA, 61 nt, Human
ucccaccaaauaguuuuggacuaucaguucuaaucuauguauuucagaaauauugguggga

SEQ ID NO: 4199875 - RNA, 91 nt, Human
ucccaccccauccugucaccccugccucucagccugaccgccauguaacccugggggugcugagaagacaggagaaggggaggggaaggga

SEQ ID NO: 4199876 - RNA, 55 nt, Human
ucccacuguuguuugucucucuggagaagguuauuuucaggcaggcagagcggga

SEQ ID NO: 4199877 - RNA, 91 nt, Human
ucccacuucuuaagucacauggcuucugucuuggaaauuuuaccuuuaaaagauuauuuaagacaggaaccaggaggcuugggaacaggga

SEQ ID NO: 4199878 - RNA, 69 nt, Human
ucccagaaaguucugaugcugaucaaaguuuaagaaucaugcuuugggucaucaguagcuuggaaggga

SEQ ID NO: 4199879 - RNA, 85 nt, Human
ucccagaauccaaucuccagugaggcagauucugcaagcuccuuggcagugccugauucugaugccucauggaucugaucuggga

SEQ ID NO: 4199880 - RNA, 76 nt, Human
ucccagacuauggagccuggguccuucccugggaacacaugguuccagaggugaacacccaggcaagagaggggga

SEQ ID NO: 4199881 - RNA, 66 nt, Human
ucucagcaggguggauuugggaaguggccuggaauauggcaggccuucccucucauccugcuggga

SEQ ID NO: 4199882 - RNA, 130 nt, Human
ucucagccccaucuguccaucagagucacagcagaccccucaccaggcuccacccuacagagcucccagaucggaucccugcugggugggccugcuggguguguauucugaugcucagugggaguugagg

SEQ ID NO: 4199883 - RNA, 73 nt, Human
ucucaggaaaagauuggaaaugacaauggcaguuaaggguugcuguuaguguaauuccaguuuucacuugugg

SEQ ID NO: 4199884 - RNA, 80 nt, Human
ucucaggauuuacuaauuucaaggguguacucuguaagggguugguugaguaaaauuuugagucuagagaaagcuugaga

SEQ ID NO: 4199885 - RNA, 87 nt, Human
ucucaggcagugacccucuagauggaagcacugucuguuguauaaaagaaaagaucgugcaucccuuuagaguguuacuguuugaga

SEQ ID NO: 4199886 - RNA, 85 nt, Human
ucucaggcagugacccucuagauggaagcacugucuguugucuaagaaaagaucgugcauccuuuuagaguguuacuguuugaga

SEQ ID NO: 4199887 - RNA, 68 nt, Human
ucucaggccccugaguuucucuaugaccuucagcagcauagucaggcuuagcagcaggggccugcaga

SEQ ID NO: 4199888 - RNA, 55 nt, Human
ucucaggcuaccuugcacaaggguuucucuuccugugcaaugguuuguacuguga

SEQ ID NO: 4199889 - RNA, 60 nt, Human
ucucaggcuguguguggaggacucagguuccuggugaauccuucuacacugccucugaga

SEQ ID NO: 4199890 - RNA, 65 nt, Human
ucucagguggcuucaucaacugugcuuauguagacauaguauuuacuuuguguggagccuggaga

SEQ ID NO: 4199891 - RNA, 65 nt, Human
ucucaguaacaggcucugugguauaccucuguagguauucaaacacuugagcuugaaugcuagga

SEQ ID NO: 4199892 - RNA, 96 nt, Human
ucucaguacuucuuauacgugcaugauauaugaguuguuuaauaccugaauuaaaaucagaugaugacuauauacaugcaguaagagaugcagagg

SEQ ID NO: 4199893 - RNA, 81 nt, Human
ucucaguauaucaaagaguuuuuaaaauaacaugauuuaauuuacauuuuuuaaaggauagcucugguugcugugcugaga

SEQ ID NO: 4199894 - RNA, 84 nt, Human
ucucaguuguaacuuuuaugucagcaauucaagagcucuuauguucuaauaagauagccuaguggauggcuguggcaacagaga

SEQ ID NO: 4199895 - RNA, 66 nt, Human
ucucaguuuccugucucguuauuuucagcugcugaaagcagugaagguggcauaggagagauggga

SEQ ID NO: 4199896 - RNA, 65 nt, Human
ucucauaaaggugccacucaguuuuagccaugucuucacugaaauugcaaaaguacuuuuaggga

SEQ ID NO: 4199897 - RNA, 59 nt, Human
ucucauccagagcauuuucaagauaugaagucaguauuacauguuuuaugcugauggga

SEQ ID NO: 4199898 - RNA, 82 nt, Human
ucucauccugcaaagagguaaccauagcaaccacgagaggcaucggggagagaggagagaggguuacugaggcagaguggga

SEQ ID NO: 4199899 - RNA, 87 nt, Human
ucucaucguguugagacucgagucucucagaccuuggauucauucccuggugucuuugagccucaguuuccucauugguaaaagaga

SEQ ID NO: 4199900 - RNA, 77 nt, Human
ucucaugacaucuuuaguuauugaauauagaaauuuaaguauuuuaguaugagacugcuagggaauagccauagaga

SEQ ID NO: 4199901 - RNA, 64 nt, Human
ucucaugaggaggcaguaaaucgugacaguauuuucauggcagcacugacugcuuuucauaaga

SEQ ID NO: 4199902 - RNA, 87 nt, Human
ucucaugcaaggcuauuaauagugccuauuuaagauuuuuaagaauucacuugaugacauuaauggcaaauuaauuauugcagaaga

SEQ ID NO: 4199903 - RNA, 87 nt, Human
ucucaugcugugacucucuggagggaagcacuuucuguugucugaaagaaaacaaagcgcuucucuuuagaguguuacgguuugaga

SEQ ID NO: 4199904 - RNA, 56 nt, Human
ucucauggccagaugucucuggagcuaguggcauggcuauacagaauggccagagg

SEQ ID NO: 4199905 - RNA, 56 nt, Human
ucucauguauugcccuggugugacugaggaccaugcucagggaaggccacgugaga

SEQ ID NO: 4199906 - RNA, 63 nt, Human
ucucauuaaaugucacuucucaguugggcuauuacugguaguaugacaggugauaucuugaga

SEQ ID NO: 4199907 - RNA, 102 nt, Human
ucucauuggaugaaguacugcugauuguauagggguuauuaauacuuaauaauauuguuuugacuccuacauaaaacaacuauguauuuuaggccagugugg

SEQ ID NO: 4199908 - RNA, 60 nt, Human
ucucauuuaauucugcccaaaagcaaauguacccaggcuuuugggcaaaauuaaaugaga

SEQ ID NO: 4199909 - RNA, 64 nt, Human
ucucauuuagaaccccuuccaaccuguucaaauauaggucccuuagauguucugaagacugaga

SEQ ID NO: 4199910 - RNA, 76 nt, Human
ucucauuuauuucucccaaaacaauucucugagguauaaguuauauuacacauguuuugggauggggaaauugagg

SEQ ID NO: 4199911 - RNA, 79 nt, Human
ucucauuugauugacaaggaaacuauaccagaauccucgguuuaaauguucugguuuugguguacuuggcauuaugaga

SEQ ID NO: 4199912 - RNA, 75 nt, Human
ucuccaacccaguuucuuuauuuguuugagugcuguuacaaaguuuccugcagcaaggagaagcuggggaggugg

SEQ ID NO: 4199913 - RNA, 107 nt, Human
ucuccaagcagcaagugaugaugucugcauaaggacaguuaucugcaaugauaaauacuaaaaguuguaggucaaguccauugugcuaacuuuucuucugcugggga

SEQ ID NO: 4199914 - RNA, 58 nt, Human
ucuccaaggugguuauuugagauagaaagauuuaaucaggaaugaauacuuuuggaga

SEQ ID NO: 4199915 - RNA, 61 nt, Human
ucuccacagcuggcccccaagaggacccuuuccaaguccccagcugggggcccuguguaga

SEQ ID NO: 4199916 - RNA, 79 nt, Human
ucuccacauguccucagcuuccuuccuccgccuuugugcuguggaauaagaaaggaaauugagggacgcaugaaggaga

SEQ ID NO: 4199917 - RNA, 92 nt, Human
ucuccacauuucugagcaguuuuacuccuguguucuuuguuaauugguccugaaaaaugacacaauuuuagagcugaaagaaacuuuggaga

SEQ ID NO: 4199918 - RNA, 67 nt, Human
ucuccaccagcugcaccagcugcacccaguaggucuccucugccaggcuuggugcuagauguggaga

SEQ ID NO: 4199919 - RNA, 74 nt, Human
ucuccagaaaucugauaugauucacucauugauccaaauuuuuaaugugcuugaagccucagagaauucugaga

SEQ ID NO: 4199920 - RNA, 68 nt, Human
ucuccagagucacacugccuggguuuggauccugauucuaccacuccacugccagcgugacuuuggga

SEQ ID NO: 4199921 - RNA, 73 nt, Human
ucuccagaguccugacgcagcaaccauuacauucccaguaauggaaauguuaagucaguccgugcucuggaga

SEQ ID NO: 4199922 - RNA, 59 nt, Human
ucuccagagugcaggugccugugagcuugaagccggaggggcugagcaacuuucagaga

SEQ ID NO: 4199923 - RNA, 64 nt, Human
ucuccaggcacuaccuggguaagccagauucuggacaugaucuaccaggguggugaccuggaga

SEQ ID NO: 4199924 - RNA, 55 nt, Human
uccuagguguuaauagcguuagacuagcagcuaaauauuauguuaacagcuggga

SEQ ID NO: 4199925 - RNA, 85 nt, Human
uccuagucuaauauuaacauauuguguggcacuaggcaggucacuccuccucuuugacuauaguaguuaaaauguagacucagga

SEQ ID NO: 4199926 - RNA, 129 nt, Human
uccuaguggaaggguuguugugaagauuaguggaaaaccaaggccugccacacuguuuguaugccaugugcagcagugacuugcuuuguuuccccuuucugguucuaguguuuccuguuguaacuaggg

SEQ ID NO: 4199927 - RNA, 81 nt, Human
uccuauauuuagauuuugacaucccucagugccuggccuggcuggaucuggugcagguugcuggucugaucucguauagga

SEQ ID NO: 4199928 - RNA, 130 nt, Human
uccuaucauacuaaaugcaucuuggaggcucaaaauaucuauuguccuaucuauuguaugagugaauguguaaaaugagcuuuaauuaggaaguauaaugaggacuuucgagaugaaugguagcauagga

SEQ ID NO: 4199929 - RNA, 104 nt, Human
uccuaucuuaugugaaaaaguuuugggccaugaaauauuaguaacuguuucaaaaacagaauagcuauauuucuguggucaaauaauuucauuauaucauagga

SEQ ID NO: 4199930 - RNA, 64 nt, Human
uccuauuacaguugggguaauuuaguuucaagguuuagaaauuugcuuuaacuaguaaaugggg

SEQ ID NO: 4199931 - RNA, 65 nt, Human
uccuauuucaguaaaacacugcaaugucugguguuucuaguaaugcauuuauuuuaugaaaagga

SEQ ID NO: 4199932 - RNA, 71 nt, Human
uccucacaagucucuuaauaaguaaauacugaugacauccucauuuuacagauaaagaugcugagugggga

SEQ ID NO: 4199933 - RNA, 85 nt, Human
uccucacaauuuguuuuaucaguauuugaaaaucuuaagaaaaaagcugagaaucugauagaagcaaguuuuuuuagugcaagga

SEQ ID NO: 4199934 - RNA, 66 nt, Human
uccucaccacaccgucggccuccucugucaacaccagcaacguaggaagcuaaguguggcugcgga

SEQ ID NO: 4199935 - RNA, 60 nt, Human
uccucacuccugcuguuggucucauuucuuccugucaaagaccuacauguauagugaggg

SEQ ID NO: 4199936 - RNA, 123 nt, Human
uccucacuuuguuugcuuuuauucucuguccucggguacccugaacugaccuaacuauacaccuuggggagaccagugaggaguccagggcagagaacaugguggcuugaaccagggagagga

SEQ ID NO: 4199937 - RNA, 69 nt, Human
uccucagagaaaugucacaacaaucuuaugcauuaggugcuauuguuagugccauuuuucauuugagga

SEQ ID NO: 4199938 - RNA, 76 nt, Human
uccucagcacaggcguguggucggcuuugagggcccgacugugcccaagagagaugagaacaugcuuggauggggg

SEQ ID NO: 4199939 - RNA, 60 nt, Human
uccucagcuccuaucucuguauggccugguuuuuccuagguuaugauuauagagcgagga

SEQ ID NO: 4199940 - RNA, 65 nt, Human
uccucaucucucugccugccacuguucaggcuccuggggccccacguggaugggcggacacagga

SEQ ID NO: 4199941 - RNA, 64 nt, Human
uccucauguaucuaagguacagugcuguuuaguugaacagcuuugcuucuggagacaaugggga

SEQ ID NO: 4199942 - RNA, 76 nt, Human
uccucauuacuacaaugacaguguugggccagaugcucaccaagccucuuccugcacugacauuuugugauggcga

SEQ ID NO: 4199943 - RNA, 80 nt, Human
uccucauugcagauuuuucacauucagauauagacuugauucuuaaaucagugugucacaaaauaugaaagcugcaagga

SEQ ID NO: 4199944 - RNA, 55 nt, Human
uccuccacgauggcacaccugguggcuggucacuguggcugcaggcgauggagga

SEQ ID NO: 4199945 - RNA, 102 nt, Human
uccuccagcugauugauuuuucuaauuauguuugcuuuagauggauauuuaaaugcauuugcauucccugagcucacauggcaggauauggagguuggagga

SEQ ID NO: 4199946 - RNA, 88 nt, Human
uccuccaggucgcccacgguggccaaccuggcccugaacucgcaccaggugacgugcaggaucugguuggcgauguagcccuggauga

SEQ ID NO: 4199947 - RNA, 72 nt, Human
uccucccaucucagaggcaggaauaaagcuuaccuuguucagcaagcagaguacuggcucuuggguggagga

SEQ ID NO: 4199948 - RNA, 56 nt, Human
uccuccccaaagcccagccuggcuggggucacggucaaaugcuggcggugggggga

SEQ ID NO: 4199949 - RNA, 105 nt, Human
uccuccccaagaggcccuaucuuucuauaccaguauguaguuucucugaugagaucagcauggaagccaguugcuuggugugguccaggaaggcuucugagagga

SEQ ID NO: 4199950 - RNA, 57 nt, Human
uccuccccucagggcaacggauggcugcagucuugccuauuuggccuguggggaggg

SEQ ID NO: 4199951 - RNA, 65 nt, Human
uccucccucucagccugcaggaaacagcucugacuugcugacugucugccagcugaagaggugga

SEQ ID NO: 4199952 - RNA, 61 nt, Human
uccucccuucucacugggaagggcugccugagauguuuccuuccuucugaggugaggagga

SEQ ID NO: 4199953 - RNA, 100 nt, Human
uccucccuucucgccagggcgccuucggccucucuuugaggccuuccccagggacucagagccucgagggacugcgggcucccuugugggugggggagga

SEQ ID NO: 4199954 - RNA, 82 nt, Human
uccuccgcagcauaugucagugccccauaacaaggugcucaauaaaugcucuucagauugcacugagcaaguugugagugga

SEQ ID NO: 4199955 - RNA, 62 nt, Human
ucucucaucuuuccuaacucugccuaucauccguguggggcaagcaaggcaggguaaagaga

SEQ ID NO: 4199956 - RNA, 58 nt, Human
ucucuccacccaccauccagauucucuuuuucugggauauguuuagguguuggagaga

SEQ ID NO: 4199957 - RNA, 59 nt, Human
ucucuccagguauuacuaaguguuaacuguugaguagauggaagugaaaucugggaaga

SEQ ID NO: 4199958 - RNA, 58 nt, Human
ucucuccaguuagcaguuccuggggcauggcugcuccagcuguugcagcacugagaga

SEQ ID NO: 4199959 - RNA, 72 nt, Human
ucucuccuuuucuguucaacauacuuguggccacuuucccauuaguuaaagucugaaauagagaaagaaaga

SEQ ID NO: 4199960 - RNA, 95 nt, Human
ucucucgcucccuccuugcugccgcauucuucugccuucauccucuuccuuugcagguagaaagaucuguaggcaagagcuaaggggaggaaaga

SEQ ID NO: 4199961 - RNA, 55 nt, Human
ucucucgguacagcuggcuggaagauccuuuuccagccugaacuuuguccagaga

SEQ ID NO: 4199962 - RNA, 101 nt, Human
ucucucucucucucucucucucugucucugucucauuagcucucauuucuucucuugcaaagcugaagauccaggguuggggagagaggaugugggacaga

SEQ ID NO: 4199963 - RNA, 108 nt, Human
ucucucugccgcccaggcuggagugcaguggcgcgaucucggcucacugcaagcucugcgucccggguucacgccauucuucugcuucagccucccgaguagcugaga

SEQ ID NO: 4199964 - RNA, 75 nt, Human
ucucucuuccuugccuuuaaccccugaaaggcuucacuuugcggccacaggcacuuaagggcugggaggcaggga

SEQ ID NO: 4199965 - RNA, 55 nt, Human
ucucucuuuuuaaucauguaaugugcuauaaagcaugauauauugacaagaggga

SEQ ID NO: 4199966 - RNA, 67 nt, Human
ucucugacccagauggcaccguggcuacuugacagccccgagccacuuugaaccacugagguggagg

SEQ ID NO: 4199967 - RNA, 64 nt, Human
ucucugagaauaucccauaagagcccuugaugcagaggccauauggcaugguacuuccagcaga

SEQ ID NO: 4199968 - RNA, 65 nt, Human
ucucugaggaagaggcuguaauuugcaugcuuaaucucaugucuauuccacuuuuccuucaggga

SEQ ID NO: 4199969 - RNA, 129 nt, Human
ucucugaguaggugcaugaaucuguguucugagaacaaguuagggucuuuuacuuaauuauaacagaugcaagaggugaugugcucuaacuuguaguacagcauaaagacaguaugauggaaucaggga

SEQ ID NO: 4199970 - RNA, 82 nt, Human
ucucugauguagaacucuugcagugaaagcuuaucuuuggaagaaacugggcugucuuucuggaagagucuuuucucagaga

SEQ ID NO: 4199971 - RNA, 71 nt, Human
ucucugcaacuacaucuuagggcugcuguaaguacuugcuuuuugccuuuccuauagguguccugcagaga

SEQ ID NO: 4199972 - RNA, 75 nt, Human
ucucugcagaggcagggugggaaccuucccgcagacacaucugcagagccucccuccucugccauucuggggaga

SEQ ID NO: 4199973 - RNA, 60 nt, Human
ucucugcccggggaauggcucuggcacugauccagaggccaucugcucuguggggaggga

SEQ ID NO: 4199974 - RNA, 71 nt, Human
ucucugcucagcugguuggaagggagcugaauagucauuuaggugcucguugcgacaggcugggguugaga

SEQ ID NO: 4199975 - RNA, 75 nt, Human
ucucuggaauuucaucuugauucuauauggccugggugcugcagccuccuaccuggucucuagaguuuucagagg

SEQ ID NO: 4199976 - RNA, 57 nt, Human
ucucuggagcugcagauccagguguucguuaccgcccggauguggcagcucuaguga

SEQ ID NO: 4199977 - RNA, 81 nt, Human
ucucuggcaguucuggucgauccuacugaguguguucucuggccagagaacacaugcagacuggguagagcugucugcagg

SEQ ID NO: 4199978 - RNA, 64 nt, Human
uccugagcuuuacaguaaggacauucauggcauuucccaagaggccuugccaguagggcuggga

SEQ ID NO: 4199979 - RNA, 106 nt, Human
uccugagcuuugauccuugguaaaggcuucugcagggacugagggagacaaagagaagaauccaucucgaucccuagccucaaggaauugacaaucuaauaaagga

SEQ ID NO: 4199980 - RNA, 64 nt, Human
uccugaggguagguccaucugggauaccaaauugcagaucacugguuacuuaaugaacuuagga

SEQ ID NO: 4199981 - RNA, 85 nt, Human
uccugagugugaaagaacuuguaaacuguuaaaagccagaauuaauaaguuauuuuggcacaauuuaccgguuuaaaguucagga

SEQ ID NO: 4199982 - RNA, 63 nt, Human
uccugaucucuucauagauuuaauaauuuucauccaaggaugaaggucuguaaagugacagga

SEQ ID NO: 4199983 - RNA, 72 nt, Human
uccugaucugacuucacgcccaugccacagaacuguccccacugcuuuauguggugcgugagcucggcagga

SEQ ID NO: 4199984 - RNA, 100 nt, Human
uccugauuauuuccuuuguguuaucguacgcuucagaaauuuccauuggagaguguuauuugggaauuucugggugagaagcauaaaugauuaaagugga

SEQ ID NO: 4199985 - RNA, 67 nt, Human
uccugauucaagaagaaguuguuaucagcccauaugaaacugguuuugacuuuauauugugucagga

SEQ ID NO: 4199986 - RNA, 65 nt, Human
uccugcagagucccacugauuugggccaacagugcuguauuugccuauccuugggaaauucaggg

SEQ ID NO: 4199987 - RNA, 57 nt, Human
uccugcagagucccuuuguucaguuggugaccaacauccugaaaaacauucucagga

SEQ ID NO: 4199988 - RNA, 61 nt, Human
uccugcagcagcuggugaccuugaaugagggcaucgaggcagugcgcuggcuguuggagga

SEQ ID NO: 4199989 - RNA, 111 nt, Human
uccugcagugccuggcaggccgaggcauccugggccaggucugugucagcugggacacucugcacauggcgcugguccugacugugccagugccuucuggguucugcaggg

SEQ ID NO: 4199990 - RNA, 96 nt, Human
uccugccaauggcgagggagagccuagagaaggcucagacuuacccagagcucaugaaacuuuugagguucuuccauacuucugccauggagagga

SEQ ID NO: 4199991 - RNA, 75 nt, Human
uccugcccacuauguggggacaacgugcugcucuucccucggaaagaugcugccucuccucacaagucgguugga

SEQ ID NO: 4199992 - RNA, 93 nt, Human
uccugcccacucccucccucucuugggcguggcucaguauuuaucuucauucccuggagcugaguugguuggagggagaggggugcuguagga

SEQ ID NO: 4199993 - RNA, 69 nt, Human
uccugcccgccgcugagccucugcggccugcagagcaccugggccgaagacgcugggcgugggccaggg

SEQ ID NO: 4199994 - RNA, 107 nt, Human
uccugccuaggaaagccuuaguguugggagggacccugaugacugaggagccugguagcuccaggucgcccacacuuucaggucucuugcaccagaagguggcagga

SEQ ID NO: 4199995 - RNA, 78 nt, Human
uccugccucuagguggcagccuuggcucuguaaaacccaggucuguuuuuggugcccugguucccacccuuggcuggg

SEQ ID NO: 4199996 - RNA, 56 nt, Human
uccugccuuagagcaaggaaaauucuuuuguucaucuuugaaaacuacaggcagga

SEQ ID NO: 4199997 - RNA, 78 nt, Human
uccugcuacugccauugucucugccaucucaggaaaggagcugagaaguggauucuaaagauagugacaguuccaaga

SEQ ID NO: 4199998 - RNA, 76 nt, Human
uccugcuaguugggugggagcaggcaggggcagcacucagaccuggugaccccuaaacccgcugggcuggcuagga

SEQ ID NO: 4199999 - RNA, 64 nt, Human
uccugcugcucuugggaaaccugcaaccacugccacaggaaugagcccagguuagccugcgggg

SEQ ID NO: 4200000 - RNA, 55 nt, Human
uccugcuggaaacuuccucuugccaagauccacuugggaaauuuccauuccagga

SEQ ID NO: 4200001 - RNA, 75 nt, Human
uccugcugggagccguaccugucacggggaagccacggcaagcagcucccgugaagguuugguuucugcuaaggg

SEQ ID NO: 4200002 - RNA, 76 nt, Human
uccugcuguaccuuucaacgugacacauuuaccuaacauccaaauucgaguaagugaggcaaagugagaggcagga

SEQ ID NO: 4200003 - RNA, 66 nt, Human
uccugcuguuuucuggcccacaaauuuggccuuucuacuacccagcacuggccacaaacaguagga

SEQ ID NO: 4200004 - RNA, 57 nt, Human
uccugcuuguucuuugugcauucuugcuauuggauuccauuuagaaauuggcaugga

SEQ ID NO: 4200005 - RNA, 80 nt, Human
uccuggaaaauugacuaguauuaagugugaguaaaagguguccacuuuuuuuuaaguuuugauuuuaguuuugucuugga

SEQ ID NO: 4200006 - RNA, 77 nt, Human
uccuggacaugguuuugccaggugggccacaggcugccucugguggcccaaagcucagcugagcgaaggacauggga

SEQ ID NO: 4200007 - RNA, 55 nt, Human
uccuggagaauggacaaugcaccgaugguaugguuucaaauucacuucuccagga

SEQ ID NO: 4200008 - RNA, 56 nt, Human
uccuggagcucacugggagccgguucucuucacagagcagccccaugguucuagga

SEQ ID NO: 4200009 - RNA, 91 nt, Human
uccuggagcucugggcuucuauagcugucugggacagggaagcuuucugggucucuguggcccaagugauggcugcgugguccguccagga

SEQ ID NO: 4200010 - RNA, 55 nt, Human
uccuggaggagauccaaucugagcuuagcuuagccuguguggacauuuucuagga

SEQ ID NO: 4200011 - RNA, 75 nt, Human
uccuggaggcagagcgcaugcgucgcagaaccgaaacguuuccgugaacaaguugcuugcuuucuguuucccgga

SEQ ID NO: 4200012 - RNA, 68 nt, Human
uccuggaggggagcucucagcugucuuuguaugcugcagcauacagugcgggugcgggccucuuagga

SEQ ID NO: 4200013 - RNA, 72 nt, Human
uccuggaggggccauccacagucuucuggguggcaaugaugcuguggacuguggucaugagucccucccuga

SEQ ID NO: 4200014 - RNA, 64 nt, Human
uccuggaguuuguaaggugagccaggaccaaggugccaggauucucauuuuguaagguccagga

SEQ ID NO: 4200015 - RNA, 69 nt, Human
uccuggauauuucaguguuuuaagaguucagugaaaauuuauuaacugaauaucuauuggaguccagga

SEQ ID NO: 4200016 - RNA, 58 nt, Human
uccuggauggccugcaggcggugucgcuucucacugagccagcggccgcccuccagga

SEQ ID NO: 4200017 - RNA, 97 nt, Human
uccuggcaagggaggacgagccaaggaccaguuuugcagaauugucaucaugaggcccugguugugugcugggcuggggcauugccccuuuccagga

SEQ ID NO: 4200018 - RNA, 64 nt, Human
uccuggcaauacucaacacuuuugcuugcuuccugcaggaauguauugaccuguugcauuagga

SEQ ID NO: 4200019 - RNA, 56 nt, Human
uccuggcagugcuuguuuuggagagauuccagggaugguaaugagcagugguagga

SEQ ID NO: 4200020 - RNA, 56 nt, Human
uccuggccaaguagauguggcgcuucaaucauccaggccugaaucugcagccagga

SEQ ID NO: 4200021 - RNA, 80 nt, Human
uccuggccaccugcagggggagucaagagugggagaaacuggcuccugcuccugcuccugcuugcaaggaaauaccggga

SEQ ID NO: 4200022 - RNA, 57 nt, Human
uccuggcccucugcaaacgccaucauguggggcgcagaguagcagagugcugaagga

SEQ ID NO: 4200023 - RNA, 56 nt, Human
uccuggccuuagcgaggcgguccgagggucaccuagagcuuugcacagagccggga

SEQ ID NO: 4200024 - RNA, 64 nt, Human
uccuggcuccugaucugucacugucccaccagcuugagggguaguguuuagguaguaguuagga

SEQ ID NO: 4200025 - RNA, 73 nt, Human
uccuggcugaggguuggacaggcaaguguaggacgagcuugaauuuccugccacugccgaccacagccaugga

SEQ ID NO: 4200026 - RNA, 55 nt, Human
uccugggaaguugcaucaccguagucaauaugcugcugugaccagagacccagga

SEQ ID NO: 4200027 - RNA, 55 nt, Human
uccugggcacuguggugcugacccuggaaugaaucagauccgagugugccaagga

SEQ ID NO: 4200028 - RNA, 87 nt, Human
uccugggccaaauauugcaugaggauuugggcaauguuuuggcuaguugaacaacaacaaugcucauauuuaugccaauuggcagga

SEQ ID NO: 4200029 - RNA, 70 nt, Human
uccugggcgguuaugugaucuggugugggaauuuuguggaccacuuuuucacauacagcaggccuaagga

SEQ ID NO: 4200030 - RNA, 111 nt, Human
uccuggggaguucuucaugccuuccggcugccagcccaccuuggggccuccacguucagauuugggagaggccucagugagggcugggagggaggaagaggaugcccaggg

SEQ ID NO: 4200031 - RNA, 61 nt, Human
ucuggcccucagacucaugggcacauucagaagucuugccuacugagacuggguggccagg

SEQ ID NO: 4200032 - RNA, 60 nt, Human
ucuggcccuggguggaaugucccauuuccuucaucacugagugggcuuccccagggcaga

SEQ ID NO: 4200033 - RNA, 63 nt, Human
ucuggccucaggcgagcugcaacuuggaucccuacugacucagcugaagcagccugggcugga

SEQ ID NO: 4200034 - RNA, 76 nt, Human
ucuggccucagucucccuccuauaaaauggggguaaaucaguaccuuucucagaggguggcugggagcaucacagg

SEQ ID NO: 4200035 - RNA, 62 nt, Human
ucuggcgccggcgggcagauggguaugcuggccaguccugucagccugccagcuggcccaga

SEQ ID NO: 4200036 - RNA, 58 nt, Human
ucuggcucauacaagccugcaaagguuuguucaauauucaggcauuuugugaaccaga

SEQ ID NO: 4200037 - RNA, 73 nt, Human
ucuggcuccugcagccguccuguuugucuacacccuucaccccaguggggaaauuguggcugacagugucaga

SEQ ID NO: 4200038 - RNA, 82 nt, Human
ucuggcucucucuuuaaagacuguuguuauugaauuuugaucaccaacagugguagcaaggacaacauaugagagagauaga

SEQ ID NO: 4200039 - RNA, 67 nt, Human
ucuggcugcuggaguugggucucuccucauguuugggcgacugagggcucaacuacuacuaggcaga

SEQ ID NO: 4200040 - RNA, 58 nt, Human
ucuggcuggggaagucauuugaugcccuugaggguaagcaaugugggccccagugagg

SEQ ID NO: 4200041 - RNA, 55 nt, Human
ucuggcuguguaagguagcaccaugugaauuccaggucuccuacccucagcuaga

SEQ ID NO: 4200042 - RNA, 62 nt, Human
ucuggcuucuccucugaguccugggagaccacgucuucccugaagcagggagaguagccaga

SEQ ID NO: 4200043 - RNA, 87 nt, Human
ucugggaaagccagguauuuguuauuugagagugcggcugcuggaggugcaguuuacucccacugaauagaagcugagggccccaga

SEQ ID NO: 4200044 - RNA, 65 nt, Human
ucugggaaaugggcagcuucgccuuggcugagccuggucagaggggcaugccuaccuuuccuuga

SEQ ID NO: 4200045 - RNA, 66 nt, Human
ucugggaagacggauggacccuaaagagcuagcugcaaacuaagugagucacauuugucucccagg

SEQ ID NO: 4200046 - RNA, 58 nt, Human
ucugggaguuagaauacaugggucaaaauaauaagacccguguaugguuagcucuaga

SEQ ID NO: 4200047 - RNA, 58 nt, Human
ucugggaugagaucagagacacggaguccaccugugccugcugccuuucaucccaaga

SEQ ID NO: 4200048 - RNA, 61 nt, Human
ucugggccaacccuuccaugggugaagacaagcaagucccccuggaggcggguggcccaga

SEQ ID NO: 4200049 - RNA, 62 nt, Human
ucugggccuccucugcccaagcuacuuagagggaugacagcaggggaaggggaggauucaga

SEQ ID NO: 4200050 - RNA, 61 nt, Human
ucugggcgugucuuccagcuggcugugggcugcauugccaguccaguaagauauggccaga

SEQ ID NO: 4200051 - RNA, 58 nt, Human
ucugggcugcugugcagugaccauuaucaaguaugaucauagcuuacugcagccuuga

SEQ ID NO: 4200052 - RNA, 61 nt, Human
ucugggcuuggaacccagggcuguguacuuaagcuuccagugacagguuccaugccgcaga

SEQ ID NO: 4200053 - RNA, 63 nt, Human
ucuggggaugagugaugucguaugguuugcuucucugccagcacugauagauucuuccccaga

SEQ ID NO: 4200054 - RNA, 80 nt, Human
ucuggggauuucaccucagucuuuuuauauggcuucuguaccaugcuguacaaauacauucugaagguagggucuccaga

SEQ ID NO: 4200055 - RNA, 97 nt, Human
ucuggggcaaauggagugccuguggcagugggccuggcacacucauuuacagcuaaacgcaguggcccauugcacaggcucaaagcucagcucuaga

SEQ ID NO: 4200056 - RNA, 72 nt, Human
ucuggggccagguguaggacaccaagggacauacugguauccucugcucugucuuuauaucuauaccccuga

SEQ ID NO: 4200057 - RNA, 67 nt, Human
ucuggggcuuuaucugagaugcacuggaugauugcaggcauauauuucugcucagcugaaccccaga

SEQ ID NO: 4200058 - RNA, 128 nt, Human
ucugggggaguggggggagccugcccggggcugugggggagccugcccggggcugugggggagccugcccggggcuguggggggagccugcccggggcugugggggaggcugcucuucacucucagga

SEQ ID NO: 4200059 - RNA, 61 nt, Human
ucugggguagggagggaguacuguagccaugguuuuacucacaguaaauucccugcaaaga

SEQ ID NO: 4200060 - RNA, 56 nt, Human
ucugggguugagucugggucagagucugcagagacugacaaggaagcaagcccagg

SEQ ID NO: 4200061 - RNA, 63 nt, Human
ucugggguuuaaagaguaacgacauuuaucucugaaaguugauggcgucuuugagauuucaga

SEQ ID NO: 4200062 - RNA, 63 nt, Human
ucuggguaugaccuauuuuuccagacuaaagcugcaacuagauggaaaaaugcaugcucaaga

SEQ ID NO: 4200063 - RNA, 77 nt, Human
ucugggucuaauuauuguccuguguaauucaaugggaauucucacagugaauuacauagacgugaauccagcccaga

SEQ ID NO: 4200064 - RNA, 65 nt, Human
ucuggguggguccuaaaugcagucacauguauccuuauaagagugaggcagagggauuuuacaga

SEQ ID NO: 4200065 - RNA, 59 nt, Human
ucugguaauaggcaauagcuugccaagaacuucuggccaggcugaauuguccuaccaga

SEQ ID NO: 4200066 - RNA, 63 nt, Human
ucugguacauuugaugauaauagguagccaaauauauuuguuaaugauccaaauuguaucggg

SEQ ID NO: 4200067 - RNA, 59 nt, Human
ucuggucaacagaaacucuuugugauuucaaaagucagaaagugaacuguugacaugga

SEQ ID NO: 4200068 - RNA, 107 nt, Human
ucugguccaagguuacagggagucagugaaggagucagaaucacuaccuguggccucuaacuccugucugcugcuauuccacuucuuggugcugguuugggaccaga

SEQ ID NO: 4200069 - RNA, 64 nt, Human
ucuggucucuuguggguggcagaugacagacaaucugguaucuguucaauggaagaugacgaga

SEQ ID NO: 4200070 - RNA, 116 nt, Human
ucuggugaguucagcacggacacuguugcuggcacagacagggcagcuuuucccaugagccacaaacauugacugcugucccuaaagcaacugucacugccccugcccuugccaga

SEQ ID NO: 4200071 - RNA, 64 nt, Human
ucucucuuggccagacacagaggcauccuguguugauggcugccuuucuuauggccaaggaagg

SEQ ID NO: 4200072 - RNA, 61 nt, Human
ucucucuuggccucucuuuggagagcagaggcggaaagcaggcuuagaggccacagacaga

SEQ ID NO: 4200073 - RNA, 84 nt, Human
ucucugacuuuauaugguugcuuguuuauuuacgaucugccaccaacuagaguguaauaagggcaagggcuuuguugucagaga

SEQ ID NO: 4200074 - RNA, 60 nt, Human
ucucugagguuuccucacaagcuguugaguuagaagcagccuucaggcaaugucaguaga

SEQ ID NO: 4200075 - RNA, 66 nt, Human
ucucugauguuugcugacuuuuuagccaaaaagaaagagaacauuugguuaacacaggcucagaga

SEQ ID NO: 4200076 - RNA, 77 nt, Human
ucucugauucuccuggauccccuuuuacuuagaggaaccuuuauaaguacauuugggaccaccuggauaaucugaga

SEQ ID NO: 4200077 - RNA, 65 nt, Human
ucucugcaauaacuacuuuaauguugguuuuccccacaacgcuagcagcugcaggaaggcagaga

SEQ ID NO: 4200078 - RNA, 68 nt, Human
ucucugcagaaaauggaguucuaaguauaguaacaauuuaguuacauaguuacuuccauuuccagaga

SEQ ID NO: 4200079 - RNA, 70 nt, Human
ucucugcaggccuugagugugguauaacagaacauaaaguacugaccacgcuuucaaaggguugcaaaga

SEQ ID NO: 4200080 - RNA, 58 nt, Human
ucucugcccauccucaguccacugcacccacccuuugcugugucaggaugugcagggg

SEQ ID NO: 4200081 - RNA, 84 nt, Human
ucucugccuuccacuccacuggacuugaaucccuugguccaugagaccaggaaacucucgucuaguuuagucuggcggcagggg

SEQ ID NO: 4200082 - RNA, 98 nt, Human
ucucugcuggcugucaacaggugauuggugggcugaggggcagcacuguagcgaguccauacaguccacacggugcagcugaggacaccaggaguaga

SEQ ID NO: 4200083 - RNA, 77 nt, Human
ucucugcuguuuaagucaaccauugugugguauuuuugcuacagcagcauaaacugacuaagacaaugagcaugaga

SEQ ID NO: 4200084 - RNA, 64 nt, Human
ucucugcuuaucaaacuggagcaggcuuugcauugaauaaagcuugcaauaaaugauacagaga

SEQ ID NO: 4200085 - RNA, 80 nt, Human
ucucugcuuucuaaggcagccucaggguagggucuggagccucugcucucagguagccuccuaucagagcugagcagaga

SEQ ID NO: 4200086 - RNA, 76 nt, Human
ucucuggcagaggcaauggaaugggcacucgguuuggagucuggcgcugccuccaccauugcucacuuugcaguga

SEQ ID NO: 4200087 - RNA, 85 nt, Human
ucucuggccugauacauaguaggggcucaguaaauacuuuuauacugagcugacaucuuccucuuuuuaugugguaguccuaaga

SEQ ID NO: 4200088 - RNA, 60 nt, Human
ucucuggggcucacuuuggucaggcgguagcuuagucgccuuucacaguggucccaggga

SEQ ID NO: 4200089 - RNA, 59 nt, Human
ucucugggugauggcagggcacccguggaugaugcagccuuggagaagucacucaggga

SEQ ID NO: 4200090 - RNA, 56 nt, Human
ucucuggguugagaacuaggaccauuuuccugguuacuguuucuacuacuuaggga

SEQ ID NO: 4200091 - RNA, 76 nt, Human
ucucugucagaaugggguaaauaaauuaggauuuggcuaaaucucugguuguuuugcucccauguuguggccuaga

SEQ ID NO: 4200092 - RNA, 89 nt, Human
ucucuguccuaauugagcacaugacuuuuagucgaguuccagaaauaugacacuugcacugagaucugugccacaaaaaggcucagaga

SEQ ID NO: 4200093 - RNA, 67 nt, Human
ucucugucugccugcaauccagagacuggcuaugacugcuugccagugucccacagggagacggggg

SEQ ID NO: 4200094 - RNA, 55 nt, Human
ucucugucuuuguugucuucacauugaguagggugaggagaggaggaagaggaga

SEQ ID NO: 4200095 - RNA, 62 nt, Human
ucucuucaauagauuguugagggacaaagcucuaucuaaaugucccuaucuaacugaagaga

SEQ ID NO: 4200096 - RNA, 99 nt, Human
ucucuucucugguucucuccuuccuuuguuugcccauaucaggauuauaggccaaggacaguaaggacaggacugaacaugcuuagagcaaacauggga

SEQ ID NO: 4200097 - RNA, 78 nt, Human
ucucuucuuuccugaucuuuccuccugugguggugaggugacuucucaaauauuuggagagaggaggucagaagcaga

SEQ ID NO: 4200098 - RNA, 66 nt, Human
ucucuugcugaauuuacauuuuuguagcccaugacuuggguagcauugguggaauuaggcaaagga

SEQ ID NO: 4200099 - RNA, 74 nt, Human
ucucuuggagguucuuccuguuucucuacuuaucucuuguuguuguuguaguucugcagaaaccuuuaggauga

SEQ ID NO: 4200100 - RNA, 69 nt, Human
ucucuuuaacucccauucuguccuuuuucauaaaagcagccagagggacacuguauaaguuagaguaga

SEQ ID NO: 4200101 - RNA, 67 nt, Human
ucucuuuacuuucaccaauuugcccugagacagacccagucaugaaaaguuugugacaguaaaggga

SEQ ID NO: 4200102 - RNA, 60 nt, Human
ucucuuuagugcuuagacgucuggucaauaaagacaaaccagaacaaguacuaaaggaga

SEQ ID NO: 4200103 - RNA, 98 nt, Human
ucucuuucuauguccaguuuuauaucuuccauugguugaagcuuuugcuggugaucagaugucagagauguggaauugucaacgagaaugggaggaga

SEQ ID NO: 4200104 - RNA, 115 nt, Human
ucucuuuuuuccccagggcagucauuaugauuaauucacaggaucacaggagaggaacuuuuaaguccauuuagguacauucuggaauguaagacuauccuguggaauaguggga

SEQ ID NO: 4200105 - RNA, 67 nt, Human
ucugaaacagcugagccacagcagcaaaagcaucagagcugggcaacugugguacagcugggacgga

SEQ ID NO: 4200106 - RNA, 68 nt, Human
ucugaaagcugcacuacuugagggaccaaggaaaauacuuggucuaucuccuggugcugugaaacaga

SEQ ID NO: 4200107 - RNA, 69 nt, Human
ucugaaaguacaaggaaaggaucugaugccguccucucuccuagcuucggguaguuccuuggcuuguga

SEQ ID NO: 4200108 - RNA, 74 nt, Human
ucuguuauuuggaggaugcuugguggucuguaaucuaaaaucugagacgauaaaggauuuuucaaaauaaucga

SEQ ID NO: 4200109 - RNA, 69 nt, Human
ucuguuccacagcacaaagccaguguggcuauuucauuuaguuucucaggccacagcucccuguacaga

SEQ ID NO: 4200110 - RNA, 86 nt, Human
ucuguuccccagucccugcuuuccucagcuggccugauugggggucuucccagaggggucgucugaggggagggugugggagcagg

SEQ ID NO: 4200111 - RNA, 64 nt, Human
ucuguuccuggaaugccguaugaagagguaggaacaggccaugaucagaaggcuccagagcaga

SEQ ID NO: 4200112 - RNA, 76 nt, Human
ucuguuccugugugugaaucugugugugugugugugugugcgcgcgcgcaugugcguugauugcagugggaaauga

SEQ ID NO: 4200113 - RNA, 65 nt, Human
ucuguucugaagguucugcacuuuauuauauaggugguagaaagcguuaaaucuacagaauauga

SEQ ID NO: 4200114 - RNA, 57 nt, Human
ucuguucugggccaggggacacuguauucugggguauccaguagggcccagagcuga

SEQ ID NO: 4200115 - RNA, 113 nt, Human
ucuguugcaaaccuaaagucaaaauuucuugaaugcuaagggccuuacaaagaugaauuggugcuucccugaaucuaaggcacucauucaaggagauaagcagugcacacagg

SEQ ID NO: 4200116 - RNA, 56 nt, Human
ucuguugcccuagccuagccauuacaauugcccaguggccuuucuugggcuacaga

SEQ ID NO: 4200117 - RNA, 70 nt, Human
ucuguuggcuggagguuucaccugaguuucacagggaaggccaggaggaacuuuuagucaaagcagcaga

SEQ ID NO: 4200118 - RNA, 63 nt, Human
ucuguuguccaggcuaaagugcaguggugcaauuauggcucacuguagccuugaccucccagg

SEQ ID NO: 4200119 - RNA, 95 nt, Human
ucuguuguccauguguggcuaggcgagggcugcagccagacccauggccuuaucugccugcagggcccgccugagcccucagugacagacacagg

SEQ ID NO: 4200120 - RNA, 100 nt, Human
ucuguuguccgaggccugggcccgcagcugcugcuccagcuucgugcggcucucauggaucucggcaaugcgggacuugagccgcucggaguucagcagg

SEQ ID NO: 4200121 - RNA, 107 nt, Human
ucuguuguuggccugugucuuucccucuuucauucuguccuuguuuggggccaccaaacuugaggcaaugaagguguagguugagaaauuacuugggcuaccaaaga

SEQ ID NO: 4200122 - RNA, 65 nt, Human
ucuguuuauagaccugggccuguuuugaaaaguagauaaucaaaaugaucccauuuagaaacaga

SEQ ID NO: 4200123 - RNA, 69 nt, Human
ucuguuuaugacggagcugguugcugcggcugccaggugcuggcagucggaagcugugcguaaaucagg

SEQ ID NO: 4200124 - RNA, 81 nt, Human
ucuguuugcaaagcauauauuuuugguuauuucuguuaagguuauuacuuagcagcaauuucagaaguuuguuuuaauaga

SEQ ID NO: 4200125 - RNA, 87 nt, Human
ucugagauuuugccuaggaacaagcuuuauucaugauuucagggauacaaauuaucaugagucauagugaagcaggagaaaucugga

SEQ ID NO: 4200126 - RNA, 81 nt, Human
ucugagcccugcacggugcuggguauugggguucuccugggaacuuagcugagccccacccuagacauucuggggcuggga

SEQ ID NO: 4200127 - RNA, 86 nt, Human
ucugagccuugaccacagcucccucucucacacagcuuccuucuuuggugagaaccaccuggaggugacuguggccauggcucuga

SEQ ID NO: 4200128 - RNA, 62 nt, Human
ucugagcgccucaagucucaugaugaagcaaaguuuuauuguuuagaagggggcugcuauga

SEQ ID NO: 4200129 - RNA, 75 nt, Human
ucugaggaaaugccccggcagccccugaacaggcuucaguagucccuucagugcuaggcugccugguuuuucaga

SEQ ID NO: 4200130 - RNA, 69 nt, Human
ucugaggaaguugcccagcugggccugaguuggggaacugggccugaguuugggaacugggaucucgga

SEQ ID NO: 4200131 - RNA, 58 nt, Human
ucugaggacagugcugugccuggccuuuccccuucaacacgccagcugcucccucaga

SEQ ID NO: 4200132 - RNA, 59 nt, Human
ucugaggccuaggcccuuucugagcccugaggccccucagcucagggccugggucugga

SEQ ID NO: 4200133 - RNA, 57 nt, Human
ucugagggaauagcuauuguagguaaggugaauaucucuaaguaggugacccucgga

SEQ ID NO: 4200134 - RNA, 88 nt, Human
ucugagggaccugccuuuucacccuggagcuuuucuggcccugagugacagauaccacagccuccagggaugcugcagguucuuugga

SEQ ID NO: 4200135 - RNA, 55 nt, Human
ucugagggaucagcuuggauacagagcucuccugggaucagcugaagccuucaga

SEQ ID NO: 4200136 - RNA, 72 nt, Human
ucugagggauuucugaauccacagcuggcuagauuuagacaaagaaacuguggaaucaucaggucuuacaga

SEQ ID NO: 4200137 - RNA, 55 nt, Human
ucugagggugggagaaggagcugagaaccagcuaccaggcccagagacccucgga

SEQ ID NO: 4200138 - RNA, 59 nt, Human
ucugaggucuaugacuuugcuucuuguuuuauaaagccucuuuaguccuagaucacaga

SEQ ID NO: 4200139 - RNA, 62 nt, Human
ucugagguggcagaugggggugcucgcccaugaaacuagaggggugugcccuguuacccaga

SEQ ID NO: 4200140 - RNA, 69 nt, Human
ucugaguaacagcuaugguacucaguugaggucguucuugcuacaugguuucaaagcuggaagcucaga

SEQ ID NO: 4200141 - RNA, 61 nt, Human
ucugaguccuuuucauagcagugggaaugcacauucccgacuuggcccaggggacaccaga

SEQ ID NO: 4200142 - RNA, 59 nt, Human
ucugaguggcagguuccguagacagcauuuucauggaauauugucaaucugcuuucaga

SEQ ID NO: 4200143 - RNA, 61 nt, Human
ucugauaaugugcuucgugaccuuauggucauuucaucauucagaagcuacaagagucgga

SEQ ID NO: 4200144 - RNA, 78 nt, Human
ucugauauuucauccucacagcuuuucaaaguggauauuggcauccucuuuuuagaguugaggcucagagaaauuagg

SEQ ID NO: 4200145 - RNA, 73 nt, Human
ucugaucacuguggaauuagaauaaccuuuugugaauaucagccuagagaguauucccuuucauggugacaga

SEQ ID NO: 4200146 - RNA, 64 nt, Human
ucugaugucaguuguagguugcagccagaauugauuugauuuugcaaaaugcaauugaguuaga

SEQ ID NO: 4200147 - RNA, 74 nt, Human
ucugauguguuuaagaaagaaguucaaaacugcuacucaaaguaguaaaauuauuucuuucuguuacauccaga

SEQ ID NO: 4200148 - RNA, 62 nt, Human
ucugauucaucuucaagucuccaggaucuaauacaguuccuggaacauaguagauggucaga

SEQ ID NO: 4200149 - RNA, 74 nt, Human
ucugauuggccaaacuggugucacugagggcugggaagauuauccccacccaagaacacacagggacagacaga

SEQ ID NO: 4200150 - RNA, 76 nt, Human
ucugauuggcuaugaggagcgcagguguauuaaacauuuucaguaagcuuuuuucuccucaauagcaaaaauuaga

SEQ ID NO: 4200151 - RNA, 70 nt, Human
ucugauuuauguauuagagcuccaugaggggccacugcuaguccacauggagcccuuugugcaagccaga

SEQ ID NO: 4200152 - RNA, 66 nt, Human
ucugauuucccacaauuaggugcauguauuuugugugcauguauauuuuauguggagagaagcaga

SEQ ID NO: 4200153 - RNA, 60 nt, Human
ucugauuucucaguucuaggaagcaggcuuaucugauuuccuaguuucuggcagauuaga

SEQ ID NO: 4200154 - RNA, 80 nt, Human
ucugcaaaccagcugccaugcucaagaagucuuuccuggaaaggcuucagugaguggguauuaagauugccauuugcgga

SEQ ID NO: 4200155 - RNA, 60 nt, Human
ucugcaaacuggcucuuacugcuuuccagagcccaaggucaaagguagccagccugcaga

SEQ ID NO: 4200156 - RNA, 66 nt, Human
ucugcaaucucauuguucccuggggacacagagugaguccaagagccagugggaaaacauugcaga

SEQ ID NO: 4200157 - RNA, 55 nt, Human
ucugcacacuuuuauugaccucugccagacccuggggucauagaagugaaucaga

SEQ ID NO: 4200158 - RNA, 61 nt, Human
ucugcacagauucucugagaauguauccagaacauaucuaguuacagagaauuaguacaga

SEQ ID NO: 4200159 - RNA, 70 nt, Human
ucugcacccagcacagccugcccagcccagcccugcccccgggcacugcacagccugucugggggccaga

SEQ ID NO: 4200160 - RNA, 78 nt, Human
ucugcagaccuugcuucuaguuuagggcucuucaacuuggaaggugggaaguagaaacuaggaagagagucucaacga

SEQ ID NO: 4200161 - RNA, 83 nt, Human
ucugcagagcccgcaucccaacccugacccaggggccggggcgcaggcuccuggagggaggcggugcuacgggacucugcgga

SEQ ID NO: 4200162 - RNA, 64 nt, Human
ucugcaggcuuggaguggcagccuuuuaaugguuuugcucaagcccggcucccgugccugcaga

SEQ ID NO: 4200163 - RNA, 56 nt, Human
ucugcagggucccagccucagcauccaaaucagaguuuagaagcugggcuugcaga

SEQ ID NO: 4200164 - RNA, 96 nt, Human
ucugcagguccgcuucaaagcccuggucugccacccacaccccuccaaauguggagaaugggggcuacaggccacaugcaguuguggaccugcgga

SEQ ID NO: 4200165 - RNA, 77 nt, Human
ucugcaggucugcuggagugugcuagaggucuacuccagacccuguuugccuggguaucaccagcagaagcugcaga

SEQ ID NO: 4200166 - RNA, 57 nt, Human
ucugcagguggauuaucagaagugcacaaaaauggcuguguagaucuggcacccagg

SEQ ID NO: 4200167 - RNA, 61 nt, Human
ucugcagguguuggaagggucagucaggaagacuuucucgagguguucagcccacugcaga

SEQ ID NO: 4200168 - RNA, 117 nt, Human
ucugcagucaaaucuacugauuucugccuccccugugucuuccucugcccaggccuggcccaggcuugguggggauaugggggguggaggagagaagaggccuagauuggcuccaga

SEQ ID NO: 4200169 - RNA, 75 nt, Human
ucugcagucaguuuucuuaaagggaagaucuagaaacaaagaaauaauagaauuuuccagaaucgacucuguaga

SEQ ID NO: 4200170 - RNA, 55 nt, Human
ucugcaucagaguuugcugcugcugcugcugcuagcaaagcuaucucuauggaga

SEQ ID NO: 4200171 - RNA, 69 nt, Human
ucugcaugaagccugcacauauuuuggggggaaaaccaaguaauccucuuugugccugcaggcugcaga

SEQ ID NO: 4200172 - RNA, 61 nt, Human
ucugcauggagaggagaugcuaauaguaaauaauuaaauuuagcacuucccaugucuuaga

SEQ ID NO: 4200173 - RNA, 60 nt, Human
ucugcauguggcugguggcuggagggauaugcacuucccaugccaugggcuggcagcaga

SEQ ID NO: 4200174 - RNA, 76 nt, Human
ucugcauuccuugaguucccugugcccugccccucgugaguguccagucccugccaggcaaauuaaggaaugcaga

SEQ ID NO: 4200175 - RNA, 83 nt, Human
ucugcauuuaagcauuuguguucuuccuagagcucagaaccaucaagagcugaugagagagacaaaugcuccuuaaaggcaga

SEQ ID NO: 4200176 - RNA, 87 nt, Human
ucugccaaucuguuagagcuuuucaaccuuuccuuguuuuuccuaacauugagaguuuugaagaguaugugucugguuuuugguaga

SEQ ID NO: 4200177 - RNA, 69 nt, Human
ucugccaccuggacaaccuuaugcaaguuacuuagcaacuugguaguaugagguguucagagugaagga

SEQ ID NO: 4200178 - RNA, 57 nt, Human
ucugccagcaccaugauccuucuuggaaaagaagcaaaaucugacugaugcuggaga

SEQ ID NO: 4200179 - RNA, 60 nt, Human
ucugccagugccucugcuuccucacugcugccgccugcucaggcagagcgcacuuuuaga

SEQ ID NO: 4200180 - RNA, 57 nt, Human
ucugccaguggauucuuauucuaggacccagaauaaggaagagagucuaaugggaga

SEQ ID NO: 4200181 - RNA, 86 nt, Human
ucugccaugcuggaggagcgcuuccgguagccggugggcuucacaccagauagacccugaaugcucucauuuuccaacauggcaga

SEQ ID NO: 4200182 - RNA, 64 nt, Human
ucugcccagccagacccaagguuuucagaacacuccuuagcguggacucugggucuggagcaga

SEQ ID NO: 4200183 - RNA, 72 nt, Human
ucugccgugcgaggucccaccacaacaaucccggggccagggugcugcgcuugguggggccugagaggcggg

SEQ ID NO: 4200184 - RNA, 85 nt, Human
ucugccuagcugaagugucuuuuagccacuuuuauacaaauaaguaauguauacuuagaauacuugggacacuucacuggguuga

SEQ ID NO: 4200185 - RNA, 60 nt, Human
ucuucccccgugcuccagugcagcggguacucguggcccugccggggcccugggggaagg

SEQ ID NO: 4200186 - RNA, 73 nt, Human
ucuucccucaacaacuucccuauccacccacccuccaccgccaccguggacuauaagucacuugagggcagga

SEQ ID NO: 4200187 - RNA, 112 nt, Human
ucuuccgggcuuaguuuaauuccucuuguguuucuccucaaucucaccuuacccuucuuuguaacuugggacagguuggagagaagcaggcagauaaacuuucccuagaaga

SEQ ID NO: 4200188 - RNA, 57 nt, Human
ucagcauccucuugauaacugcauacuucuuuuuaugcuugucuucaggaaugcuga

SEQ ID NO: 4200189 - RNA, 84 nt, Human
ucagcauccuggaaagucuuugcaauuuauguggaauuucucauguggagcucuacacauuuguaaaggcauuuguaguccuga

SEQ ID NO: 4200190 - RNA, 75 nt, Human
ucagcaucugggauggcuccgcugcugcugagugguaucuuucugaguggcuagcaggcuagcccagagaucuga

SEQ ID NO: 4200191 - RNA, 128 nt, Human
ucagcauugaguaaaagguuuggauagugagaaguuugaaagaccaauuagauuuuacuucugugagagcuggaaaaguuguuuuaaucugccuuacuuuaacguuucccauuccucaccaaaacuga

SEQ ID NO: 4200192 - RNA, 58 nt, Human
ucagcauuggagaggagggccggaggccccuauugacaauucucuucuccagagcugg

SEQ ID NO: 4200193 - RNA, 67 nt, Human
ucagccaaauguauucucacuucagggaugcaagaacaggccuugcaggugcaguacagccagcuga

SEQ ID NO: 4200194 - RNA, 63 nt, Human
ucagccacaccacuuccuuauggcucucggucuccuuagcagccguauuauggugguuucuga

SEQ ID NO: 4200195 - RNA, 130 nt, Human
ucagccaggcccuccgccuugcugccagggcugcgggcuccucaaggucucaggaauaacagggccccugugccugucuccucugcagggugaggcccucagcccagaggguguggacuggccugguggg

SEQ ID NO: 4200196 - RNA, 62 nt, Human
ucagccaguugccccaguuaguugaagcugcaguagaggauuaguggguguugcauggcuga

SEQ ID NO: 4200197 - RNA, 84 nt, Human
ucagccccuaaaagaaaucaagucacuguuaaaugguggaguauacauucuguuagugagugacuugacacuugugaggguuga

SEQ ID NO: 4200198 - RNA, 63 nt, Human
ucagcccugaggacagaggcagccugcauuccagucccagcucuucucugucucgguguguga

SEQ ID NO: 4200199 - RNA, 56 nt, Human
ucagcccuggcacugucucccauucucagaggagacagggcagagccagaggcuga

SEQ ID NO: 4200200 - RNA, 71 nt, Human
ucagccucucaaagugcuaggauuauaggugggaggcaccacaccucgcccagcaacuuuuaaaggucuga

SEQ ID NO: 4200201 - RNA, 83 nt, Human
ucagccuuagucaacaaguguauuaauggaaauacuauggcucaguauguuccacauugguaaacuugacagaaauagccuga

SEQ ID NO: 4200202 - RNA, 60 nt, Human
ucagccuucccagucaccaggacuacagccacauuccacugugccuggcugggaaucuga

SEQ ID NO: 4200203 - RNA, 66 nt, Human
ucagccuuguggcccugcuccagauauuuccucuugaggccaaucacagggaccacaaaaagcuga

SEQ ID NO: 4200204 - RNA, 70 nt, Human
ucagcuaccacaggacacaacugcugaccucccgccaaagggaggcuggaacauuuuuguccuugucuga

SEQ ID NO: 4200205 - RNA, 111 nt, Human
ucagcuacuguagauugguacauuacucacugacugcaagucaaguuaaacuugaaagccuggauuuaacuuaacuuggucaugauauauugucuuuuauacaauuguugg

SEQ ID NO: 4200206 - RNA, 56 nt, Human
ucagcucccaggaacuaagaaucaugauuugaaauauaaggacuccugggaguugg

SEQ ID NO: 4200207 - RNA, 75 nt, Human
ucagcucgagcggcgugaaccugcagagcauggauucguccacgucuccuugcugcaguucacccugccgucuga

SEQ ID NO: 4200208 - RNA, 79 nt, Human
ucagcugcaggucagcuaggcagcugcgauggccuugggauccacuggcaguuggcuagccuucauugaccucagcugg

SEQ ID NO: 4200209 - RNA, 87 nt, Human
ucagcugccugguugggaagcaguaugucugugcucaagagagugagcucuuaaggccaauuacauauguucacauuccaggccuga

SEQ ID NO: 4200210 - RNA, 55 nt, Human
ucagcugcuucauguucugaauucuaaugaauuugaaacuauacugagcagguga

SEQ ID NO: 4200211 - RNA, 58 nt, Human
ucagcuggaagauggugcagaauccuaagguaggguccucugcagugcuuccagguga

SEQ ID NO: 4200212 - RNA, 61 nt, Human
ucagcugggggccuuacggaacuccagggugcuggaggccccguuggucuccauuugcagg

SEQ ID NO: 4200213 - RNA, 87 nt, Human
ucagcugugucaaaugcugcugaugugauagguugcuagaucaauaacagaauugccuauuauauuuaguaauguggaguuaguugg

SEQ ID NO: 4200214 - RNA, 60 nt, Human
ucagcuuucucucgccaucagguggaucucuugauaugacuugcuggugggugaggguga

SEQ ID NO: 4200215 - RNA, 68 nt, Human
ucagcuuuggagagaguuaaauauguuagugaaaucagaacaaauuuucaaguucuccacugaccuga

SEQ ID NO: 4200216 - RNA, 62 nt, Human
ucaggaaagccuagaagagaacacauagcaccagacacauugugucaucuuucuuucacugg

SEQ ID NO: 4200217 - RNA, 90 nt, Human
ucaggaagaaagacagaaguggugggagauugucguggguuccaguucaucaucauucucccccacuucacauccaucuuuuuuuccuga

SEQ ID NO: 4200218 - RNA, 57 nt, Human
ucaggaagacaaucuuuggcucagucagcugggcugaaguagccagguuuucccuga

SEQ ID NO: 4200219 - RNA, 57 nt, Human
ucaggaaggcucuggccuuagagacacagacacagcugugggcagagcaccaccugg

SEQ ID NO: 4200220 - RNA, 86 nt, Human
ucaggaauagauaaaaggcauucaucaggcagccaggcccaauuaucaugucacgcugaaugaauguauuuuaaaaucuuuucuga

SEQ ID NO: 4200221 - RNA, 74 nt, Human
ucaggaaugcaggcagacuuugagaaugauguaucuuugcuuacucuucuugacagguuuccuauuauucaugg

SEQ ID NO: 4200222 - RNA, 63 nt, Human
ucaggacaacauguugcuaaucugagcaaaaaguucauuuaccaaguagcaauguucuuguga

SEQ ID NO: 4200223 - RNA, 67 nt, Human
ucaggagaaggcaauguggaaaugaaugcuuaagagaaguaccuguugcaucaauuccuuguccuga

SEQ ID NO: 4200224 - RNA, 63 nt, Human
ucaggagagaguuggguaggcuuccacagcacauuccagccuccucauuucucaucucccuga

SEQ ID NO: 4200225 - RNA, 70 nt, Human
ucaggagcagggggaagcucugucuucacugauugauuuuucugagaagugaguuccccauuucuccugg

SEQ ID NO: 4200226 - RNA, 69 nt, Human
ucaggagcuuagaugcuuugaccuuuuauuuacucuguccuuugggcuaauugucaucauggcucuuga

SEQ ID NO: 4200227 - RNA, 55 nt, Human
ucaggaggagcucauaaguuuggcuuugcagauguugagguuuaggcucucuuga

SEQ ID NO: 4200228 - RNA, 55 nt, Human
ucaggaggcaaguagguauugacaguucccaaggucaaacuuccuggccuccuga

SEQ ID NO: 4200229 - RNA, 59 nt, Human
ucaggaugaagucagaggggucaguaguuccugagcugaccuuuuuaaacaaauccuga

SEQ ID NO: 4200230 - RNA, 72 nt, Human
ucaggaugggucugagggccuuaccacuccuguacccaccaacccaggacugguacuucaagaccccacugg

SEQ ID NO: 4200231 - RNA, 106 nt, Human
ucaggauucugcuuggagcaugugucguagggaugcagcaguucagaagucaauaaaccucagugagcucauagcucuuauuauguacaaaaucuaacagcccuga

SEQ ID NO: 4200232 - RNA, 64 nt, Human
ucaggauuucaacuuuaugcauauguauuuuuaauuaaaguauaauugcauggaauuggauuga

SEQ ID NO: 4200233 - RNA, 58 nt, Human
ucaggcaaucugacagcuggagccaaugggaaauggguagcaugucagaggagccuga

SEQ ID NO: 4200234 - RNA, 58 nt, Human
ucaggcacuuggaggaguuggguauggggagaaauacagagcaccugugagagccugg

SEQ ID NO: 4200235 - RNA, 58 nt, Human
ucaggcagaccaccgugggcagcucugauauggauacgugcacacuggauugcucuga

SEQ ID NO: 4200236 - RNA, 89 nt, Human
ucaggcagccuuaucugucauccuagaacuccaggacagucccacauuguguugggaguggccacgacugggagauggaucugcucuga

SEQ ID NO: 4200237 - RNA, 55 nt, Human
ucaggccacggcucacugagacagcccagauugucuugcugauuagccugcuuga

SEQ ID NO: 4200238 - RNA, 62 nt, Human
ucaggcccauuuguagccacuuugcauccuagucuauugcaguuggcuuccugagggucugg

SEQ ID NO: 4200239 - RNA, 58 nt, Human
ucaggccgcccugggcuguggucauccucgcugugacagcaagccaaauguggcccga

SEQ ID NO: 4200240 - RNA, 69 nt, Human
ucaggccucuggagguggcaguguccccacagucccgcagaaaaacacagagacacuuuugaggcugga

SEQ ID NO: 4200241 - RNA, 58 nt, Human
ucaggcuagacuuuggcgaagcacagcacccuggggcugagccugaagguuagcuuga

SEQ ID NO: 4200242 - RNA, 55 nt, Human
ucaggcugaccagguuuugcucugcaauuauguuuaccaggaguuggcagucuga

SEQ ID NO: 4200243 - RNA, 77 nt, Human
ucaggcuguggcuguguggcugcucuggaccuggaguggaugguguggugucagggcuggacacagcugcagccugg

SEQ ID NO: 4200244 - RNA, 64 nt, Human
ucaggcuuccagaggaacucugcagugcgugacgaacguauuguugcauccucugaagagcuga

SEQ ID NO: 4200245 - RNA, 60 nt, Human
ucaggcuuccaggcucugcugaccacaaguucugcugccagcaaggcuggcaggccuaga

SEQ ID NO: 4200246 - RNA, 58 nt, Human
ucaggcuuuuucucaaccucuugcugccagguuugcauugagguagggugggggcuga

SEQ ID NO: 4200247 - RNA, 65 nt, Human
ucagggaagacuucuuagaggagguagcaguuaagcuagcccuuaaagaauaagucuuaucuuga

SEQ ID NO: 4200248 - RNA, 56 nt, Human
ucagggagggaccugaggcuggaggcguuccaagcuggagccugggcucugccugg

SEQ ID NO: 4200249 - RNA, 55 nt, Human
ucagggcaagauugguuaauaauuaaagaaucuauuauuuaucaauuugcccuga

SEQ ID NO: 4200250 - RNA, 59 nt, Human
ucagggcuagggaaguugagugauggguuuuuuccaacugcuucuuuucuggcccauga

SEQ ID NO: 4200251 - RNA, 58 nt, Human
ucagggucaggacccagcuguuccaaccaccccguggcagagguggccugaccucuga

SEQ ID NO: 4200252 - RNA, 55 nt, Human
ucagguccuuuugguguauauuucauaaggguguaggugcauggagggguccuga

SEQ ID NO: 4200253 - RNA, 72 nt, Human
ucaggugauaugcuacgugcuguguaaguaucuuauuaaauauucacagcaacccugaggcgaguuacauga

SEQ ID NO: 4200254 - RNA, 68 nt, Human
ucagguggggcagccagguaccuuuauaguaugauuugaaggccucaggugaggcugcccuagccuga

SEQ ID NO: 4200255 - RNA, 71 nt, Human
ucaggugguagagugucauaacagugcccaucacgcaagugagacuguggcucucaugcacucccaguuga

SEQ ID NO: 4200256 - RNA, 79 nt, Human
ucaggugugcccuguuuggaggcuuguuggccuggggaagcuggaggcaggcuaacuacaagcggggcauccuaccuga

SEQ ID NO: 4200257 - RNA, 82 nt, Human
ucagguuaauuuugaccauagaauggauugacaagauuuuaauauacgaaauuuuucauuuuucucuggagaaauuucuuga

SEQ ID NO: 4200258 - RNA, 66 nt, Human
ucaguaacagagaacucagguguuaggaggcauuauugccagcugccuagaguuuucuguuacuga

SEQ ID NO: 4200259 - RNA, 73 nt, Human
ucaguaagugccaggcucuugcaguguguccugaguuucucauggcacuuagcacaguccucacacuuacugg

SEQ ID NO: 4200260 - RNA, 72 nt, Human
ucaguaauauuuuacucuaggccagagguuggcaaacuucuugguaaagggcuagagggcaaauguugcuga

SEQ ID NO: 4200261 - RNA, 69 nt, Human
ucaguagaaaggggucaggcauguucugcucuguccagcagacacagggcaaugcuuugaccucacuga

SEQ ID NO: 4200262 - RNA, 87 nt, Human
ucuccaugaugaaagguugucuguauugaaguaggagaagucagauuucucucucagccauuacagaaccucauauaugauggaaga

SEQ ID NO: 4200263 - RNA, 69 nt, Human
ucuguaggaggggcuucccaccagcucugaucauagcucagccagcucccaagugagccccuuggcaga

SEQ ID NO: 4200264 - RNA, 74 nt, Human
ucuguaggcuggaaguccaagaucaaggugccagcauguuuggugucuucugagacuucucuuugguuugcaga

SEQ ID NO: 4200265 - RNA, 70 nt, Human
ucuguaggugccugggagcucccugaggaugaagucaucugccuagggccuaaccagagccugccacaga

SEQ ID NO: 4200266 - RNA, 69 nt, Human
ucuguaguggccugaggcaauagucagacauggcugguagagcugugcugccucagaagucauccugga

SEQ ID NO: 4200267 - RNA, 60 nt, Human
ucuguauauauuguggcagagaaauugucccaugauaaucuugguugcaguauauccggg

SEQ ID NO: 4200268 - RNA, 69 nt, Human
ucuguauccaguggaaauuguguucauuuuaaauuaaaauaaaaugaacgguguccaucuguuugugga

SEQ ID NO: 4200269 - RNA, 62 nt, Human
ucuguaucucacuucuuuguggcucccaaccccaccacuccacccagagagcuagguacaga

SEQ ID NO: 4200270 - RNA, 78 nt, Human
ucuguaugauagggaugaagaugguauuucuucagaagguagugaugaggaauaaauaucucauucuuggcauguagg

SEQ ID NO: 4200271 - RNA, 67 nt, Human
ucuguauucaguauuuuccuuguuaacuuaagaaauauuuuuuguugaugauaauacugaugacgga

SEQ ID NO: 4200272 - RNA, 56 nt, Human
ucugucacacuaaaacaagaaguugggucauauucacaauucuaaauugugacaga

SEQ ID NO: 4200273 - RNA, 59 nt, Human
ucugucacuuauuaagauggauggcuggagugcagcuuuccauuacuggaaauggcaga

SEQ ID NO: 4200274 - RNA, 62 nt, Human
ucugucacuucaguuuugaaacaagcuguuuuagcuuggugauuccaaaauaaaguuucaga

SEQ ID NO: 4200275 - RNA, 58 nt, Human
ucugucauguuucauguuuguaggaaaauuugacaaagggccuauacauggagacagg

SEQ ID NO: 4200276 - RNA, 88 nt, Human
ucugucauuucugauagauuucugacacaggaaugccagcaacaauacuaaggguguucuuaaucccacaaaucuucaaggugacaga

SEQ ID NO: 4200277 - RNA, 81 nt, Human
ucuucagugaaucucauagcaaagcuccguaguuauuuuccauuaagugucaaauaucucagcuggcuaugucccuaaaga

SEQ ID NO: 4200278 - RNA, 70 nt, Human
ucuucagugauuguacuguugugccuauguggugugcuuuuuagguacaguagacagacaguuaaaugga

SEQ ID NO: 4200279 - RNA, 61 nt, Human
ucuucagugucacaagagcaagccugcccccaccagcgccacagugaggugacacagaaga

SEQ ID NO: 4200280 - RNA, 62 nt, Human
ucuucauguuaguuggguuuucugugacuugcgucaccuaaaaaagacauaacaaaugaaga

SEQ ID NO: 4200281 - RNA, 63 nt, Human
ucuuccaagaugcuaaaaaauccuuggucugcugacagcaacagggagcugcgucuugaaaga

SEQ ID NO: 4200282 - RNA, 64 nt, Human
ucuuccaggagucugguauuaguccugccaucuggguguuaggggaaagcagaauccuggagga

SEQ ID NO: 4200283 - RNA, 66 nt, Human
ucuuccagguccuucuugagaagacaugaauaacucugcacugucuuuuuccauaacuugagagga

SEQ ID NO: 4200284 - RNA, 81 nt, Human
ucuucccuuggccuucaguuaugugccaaggacaaugagaggguucucagcuguugauggaagugcugaagggagggagga

SEQ ID NO: 4200285 - RNA, 71 nt, Human
ucuucccuuuuucugccauucaaagaggaucugugucccucagaucuuugcaguggugaauaaagagaaga

SEQ ID NO: 4200286 - RNA, 61 nt, Human
ucuuccugcacagaggagccuggcccaaaaaagauaccccaggcuucuccgugcaggaaga

SEQ ID NO: 4200287 - RNA, 69 nt, Human
ucuuccuucuccccauuugccacaagcuuuuucacggguuccauggcagcaguggagguagaaagagga

SEQ ID NO: 4200288 - RNA, 61 nt, Human
ucuuccuuggcucuggucuucauuaucuaggaugguaaaaguacacacagagccaagaaga

SEQ ID NO: 4200289 - RNA, 60 nt, Human
ucuuccuuuucacccuguaacguggguauugcaugauccauguuucugagaaaaguagga

SEQ ID NO: 4200290 - RNA, 73 nt, Human
ucuucgaaaaccuucaaucagcagucuagcuuauauuaauauuuagguuauugaggcuauugaguauugagga

SEQ ID NO: 4200291 - RNA, 68 nt, Human
ucuucgggagaauggaugaguguuugggguguuucaucugcuccaacaauuucccaguuucccaugga

SEQ ID NO: 4200292 - RNA, 78 nt, Human
ucuucuaauuuucauuuugugaaaauguucagugaaacaaauuuuuaaauggcauuuucccagaucgacauuagagga

SEQ ID NO: 4200293 - RNA, 95 nt, Human
ucuucuacaaaauuggaaauauagaauggaaaguguugagagguccauucaaacaucaacauucuuaagauuugugucucacaguuuugagaaga

SEQ ID NO: 4200294 - RNA, 68 nt, Human
ucuucuacccaauggcacugcccaaagagaaaaagacaagcauuuugcuuugugccuuuggguggaga

SEQ ID NO: 4200295 - RNA, 64 nt, Human
ucuucuaucaggaggaaauuuccauuguuaacacuagcaggacaauuuccacuugguaaggaga

SEQ ID NO: 4200296 - RNA, 97 nt, Human
ucuucuaucuuccccaaaguccuggcauggaauugucccugagguaacaguuucugggaccaagaucagcacagaggaaauggggcaggguggggga

SEQ ID NO: 4200297 - RNA, 98 nt, Human
ucuucuccagggcuucagcagacauuauuuucuggcaucaaauaaagggaauuggagccuuaagaauauaguguugcuguugucuacuguggacugga

SEQ ID NO: 4200298 - RNA, 130 nt, Human
ucuucucuguucccuggaaaucuuucugaaguacugcuccuaacccuuggucccugggguuucucccccuccugaggccagugugggaguaguucuuuggaaagcuggcggggaauagcaauagugaaga

SEQ ID NO: 4200299 - RNA, 59 nt, Human
ucuucugccuuggacuagauuacagcaccaguuuuccugguucuccaggcugcagaggg

SEQ ID NO: 4200300 - RNA, 75 nt, Human
ucuucuggggucugccugucuggaugacagaugcaaagggcauaagagucugggacaggcgaggacccaggcaga

SEQ ID NO: 4200301 - RNA, 61 nt, Human
ucuucugugauucuucacuugcuucaggccaccuggauguauacgugcaggucacagggga

SEQ ID NO: 4200302 - RNA, 65 nt, Human
ucuucuucucacccguccauugauuucuccacaccuccagccaacuuccaggguagaggggaaga

SEQ ID NO: 4200303 - RNA, 69 nt, Human
ucuucuucuucaagugcugcauucuuuguaaaugaaagaggccaaucaauagggcaauaaggaaggagg

SEQ ID NO: 4200304 - RNA, 85 nt, Human
ucuucuugcuuguuuauacaucaauugacacacaagagcuguucuuucuucugguccucucugugaugcuauagacuagggaagg

SEQ ID NO: 4200305 - RNA, 66 nt, Human
ucuucuuuacuucauuuccagugaggacauacuuaagucuguuccuuaggaaaaugaugaggggga

SEQ ID NO: 4200306 - RNA, 63 nt, Human
ucuucuuuagcacuugcaccuguguggaauacuacaggaaggcucuggaggugcugaugaaga

SEQ ID NO: 4200307 - RNA, 58 nt, Human
ucuucuuugggcuucauucagaguuggaacuucucaccucucccaggcucagggaaga

SEQ ID NO: 4200308 - RNA, 57 nt, Human
ucuucuuuuugucccacagaauggcugcuauaccauuaggaaggggagggaagagga

SEQ ID NO: 4200309 - RNA, 91 nt, Human
ucuugaaaagugaaucaauagugcuuacauuaucaugaauauggauauauuuuucuuugcucagugaaguacuguucuaaaacuuaagaga

SEQ ID NO: 4200310 - RNA, 97 nt, Human
ucuugaaagaacugugacaaagagcauaugguucucaaagccuuaacuauuuacuaagcuuuacagagaaaguuugccugaucuaguauuuucgagg

SEQ ID NO: 4200311 - RNA, 66 nt, Human
ucuugagaauuuucaguuucacuuuguuuugaacuuugaauccaaagacugcugagaauuuuagga

SEQ ID NO: 4200312 - RNA, 73 nt, Human
ucuugagaguuauuuauauauuuuauaugcaagccccuuguucaaugugugguuuguaaaugauuucucuugg

SEQ ID NO: 4200313 - RNA, 72 nt, Human
ucuugagcagcuggaauuacaggcacgcaccacuacaccuggcugauuuuuguaauuuuaguagagacaggg

SEQ ID NO: 4200314 - RNA, 84 nt, Human
ucuugauccugucugauugauaccaaugugcuuuguggccccuuccuuuuccacgccagagguaucaaagauaguagacauaga

SEQ ID NO: 4200315 - RNA, 67 nt, Human
ucuugaucucuucuagcucugaaauuauggaaaugaaugauucaguuccuagacagagguuucaaga

SEQ ID NO: 4200316 - RNA, 64 nt, Human
ucuugauguauguuguccugccccaagucauggggcugcugggcuggaaaaacaacauacaaga

SEQ ID NO: 4200317 - RNA, 61 nt, Human
ucuugauuuugugaauaaguuguauuggaauuguuucuaguuguugauuauagaaucaagg

SEQ ID NO: 4200318 - RNA, 78 nt, Human
ucuugcaaagcacagaagcuugaaggagcagugaccauccauagaaggacauggcaaaccucaggcuaccuugcagga

SEQ ID NO: 4200319 - RNA, 62 nt, Human
ucuugccaccgucauggccauuauaauugagcaccuaugaugugccauauguuggacguaga

SEQ ID NO: 4200320 - RNA, 123 nt, Human
ucuugccaccucaugggcuacaccuugaccuaacguuuuuauguguauacuugugcuuacucuauaaccuuuuuaggguuugcugcagaugggcauauaggccaggggcaagagguggugaga

SEQ ID NO: 4200321 - RNA, 56 nt, Human
ucuugccagcacauaugcguuggagauggaaauuaaacugcaaaugaugcuggaga

SEQ ID NO: 4200322 - RNA, 64 nt, Human
ucuugccuggcacuccuggagcucacaaaaagccugccacuugugagccugugugccuggaagg

SEQ ID NO: 4200323 - RNA, 70 nt, Human
ucuugccuucaaauucucuuagcugaauauguauucauaguauuaauugaaggguguuuggagaaaaaga

SEQ ID NO: 4200324 - RNA, 65 nt, Human
ucuugccuuugagcuccuugagggcaaggacuauguccucuuuguccuuggcucuagaggugaga

SEQ ID NO: 4200325 - RNA, 57 nt, Human
ucuugccuuugucuucaaaggcucugccaaugugaaguacaggagagagaggcaaga

SEQ ID NO: 4200326 - RNA, 56 nt, Human
ucuugcucuuugaugaauuuuccuuaaauauggggugugggaaaagaagaguagga

SEQ ID NO: 4200327 - RNA, 118 nt, Human
ucuugcugcugcucacucuuuggguccacacugucuuuaugagcuguaagacucaccgugaaggucugcagcuucacuccugaagccagccaagaccacgaacccaccagaaggaaga

SEQ ID NO: 4200328 - RNA, 72 nt, Human
ucuugcuggcugugcuguguuugggccaggcccucuuucgggccugccugaaggucagccacccuguccaga

SEQ ID NO: 4200329 - RNA, 82 nt, Human
ucuugcugggagcccucagucuggcugggaagacagaugcuaaagaugugaucauaccaaucagcugaccucccugcacaga

SEQ ID NO: 4200330 - RNA, 77 nt, Human
ucuugcuucucccuaggugcccuaaggugcccuaaaucaucugggucugcaggagagugcccuagagaagagcagga

SEQ ID NO: 4200331 - RNA, 66 nt, Human
ucuugcuuguugcuaagcagaugauguaagaauauauuaaaaaucauaaauauuagcacaguagga

SEQ ID NO: 4200332 - RNA, 68 nt, Human
ucuugcuuuggaucuauuugcugagcuagaaauuucuggacucagccuuggaaaugaauccugcagga

SEQ ID NO: 4200333 - RNA, 94 nt, Human
ucuuggaagugacaaucaucaccucuguaguauucaaacaaacuaacacugauacaaugugcaagagaacuacacagggaugugacuaccagga

SEQ ID NO: 4200334 - RNA, 98 nt, Human
ucuuggaauucacgagauggaagcauagaucaaagcuguuuggagaaaaucggaaguacaguuuuaucuagccacaucuuggagacauuauugcaaga

SEQ ID NO: 4200335 - RNA, 83 nt, Human
ucuuggagaaaguuguucaguugacuuggagaggaaugcgugggaaugcaguuccaagaaucacugacacagcucuccuggga

SEQ ID NO: 4200336 - RNA, 59 nt, Human
ucuuggagauaaugaccugugacuaguaacuaacuacacaggagaaaagaucucccaga

SEQ ID NO: 4200337 - RNA, 60 nt, Human
ucuuggagugcuagaguauguuggugcuggugagagcacggcuucaucuuuacuucaaga

SEQ ID NO: 4200338 - RNA, 105 nt, Human
ucuuggcucagcccccugaagucagaagggcccuuccuucccauccuuucagaaggaagagagaagaggaaggcaaggucccagugacaggggaagggcccaaga

SEQ ID NO: 4200339 - RNA, 130 nt, Human
uccaauuaaauaugaaucuaagaucaaaccaugaguaguuuguuuaguauaagucugucucaaauguuguacagaacauacuuauacuaaauaauguugguugacuaccugaaauucaaauuugguugga

SEQ ID NO: 4200340 - RNA, 71 nt, Human
uccacaacagagcacauagauuggaguuuguggagccaauuugagcuuuggcuguguugcucugucacuga

SEQ ID NO: 4200341 - RNA, 104 nt, Human
uccacacaggacugcugccugggccugaggaaugcuccugacuuagcuuggggaaggacaggaaguauuccugggacagccugggugggaccaguuagggugga

SEQ ID NO: 4200342 - RNA, 56 nt, Human
uccacagacucaugcuccugaagcaagccacaugugugguggcaugaggguguggg

SEQ ID NO: 4200343 - RNA, 77 nt, Human
uccacagagcuauguuuccagauaugucacccucacagagcaugaugugaauggcacuccuggagguucuggaugga

SEQ ID NO: 4200344 - RNA, 75 nt, Human
uccacagcaacuggaggccuuaucugcuacugguuuuuggcaggcagacaaccaggucuuucaguuuacuuugga

SEQ ID NO: 4200345 - RNA, 114 nt, Human
uccacaggccaugggggcugcauguacgggauuagggauggcaggaggaagguggcccugagcagacagcuauguucccuuuugcuauaacugagguccugggcccacguugga

SEQ ID NO: 4200346 - RNA, 56 nt, Human
uccacaucucuguaggaggaguugcaaaaucacauugcaagcagcagagauauggg

SEQ ID NO: 4200347 - RNA, 89 nt, Human
uccacauucuguugauacuguuagagccagaaaccuacagaguaauuaguuuagguuuugucuacauagcaccaacagaagcaauugga

SEQ ID NO: 4200348 - RNA, 79 nt, Human
uccaccauuguugaaaaucucuugguucagaagccucgguuucuaucaggggcugaaucuccagagauuauuuggugga

SEQ ID NO: 4200349 - RNA, 117 nt, Human
uccaccccggacucuuggucacuguuggcugacagaucuggaucugaacuuuucagauugucuuggguuagaaucagagcagaaucuucaucgccuugugaagggcuccgggaugga

SEQ ID NO: 4200350 - RNA, 73 nt, Human
uccacgcugggccaggcaugugaucagcacaguggacacaguguaagugcacagucugugcccuugugcugga

SEQ ID NO: 4200351 - RNA, 69 nt, Human
uccacguguucuugucguacugggugaacuuggucagguugagccccaggcccuggcagagcuugugga

SEQ ID NO: 4200352 - RNA, 108 nt, Human
uccacuacuaauugaucagagcuggcacuugggacaaaaucuauuugcucuccccgcauuaagguauuguccagaguuucucuuuguuaaaaugucaauacuugugga

SEQ ID NO: 4200353 - RNA, 62 nt, Human
uccacuagauaugguauucacagcaccugguacauuccagauguuuaauacauauuugugga

SEQ ID NO: 4200354 - RNA, 77 nt, Human
uccacuccagcugcccugccucagacuccucaguuucgcacgugaggaucgucuugcaggcacugacuggagaugga

SEQ ID NO: 4200355 - RNA, 62 nt, Human
uccacuccaugccccucagccaguauaagugguggccauauggagugggccauggagugaga

SEQ ID NO: 4200356 - RNA, 69 nt, Human
uccacucugugcuuccauaaauguaaacagugagaaacuguguuuacaugcauaagcuuaagggaugga

SEQ ID NO: 4200357 - RNA, 107 nt, Human
uccacugaagaagaagucgugauuuaugcauuauacuguugagggccguuugggaugccuacaauaaauaacagugcuauaacauccuuguuccuguuucuggugga

SEQ ID NO: 4200358 - RNA, 84 nt, Human
uccacugccaaacugacauuuaauaguauugugggaaccuaccacaggucuugcagaaaauaguauagauuuguuugguaggga

SEQ ID NO: 4200359 - RNA, 129 nt, Human
uccacuggcaugauugcauuguuuaaacaaccaaaugaacucaacagcugacaaauaacccagugguuuccauuguauuuggagcugugugagcucaaaugaucagugaugagaucugccaaaguguga

SEQ ID NO: 4200360 - RNA, 83 nt, Human
uccacuucagggguacuuagcaccuauggcauuuuuuugugacaggagagaagacagagaguguggguacauauccuggugga

SEQ ID NO: 4200361 - RNA, 63 nt, Human
uccacuuccauggaaacaagucacuuuaucuugaagguuucccuuuagcuugccuggaaggga

SEQ ID NO: 4200362 - RNA, 72 nt, Human
uccacuucuugucacugcauccccagcuccugguacaucgugggaguggggcggacaggaccaggaaguggg

SEQ ID NO: 4200363 - RNA, 56 nt, Human
uccagaaaauuuuacagugccuuguugucagugugaagaacuguugauuuucuggg

SEQ ID NO: 4200364 - RNA, 59 nt, Human
uccagaaacuuuuccagucucagggauuccucuggucguagagacuguugaguuguggg

SEQ ID NO: 4200365 - RNA, 97 nt, Human
uccagaacaauauaaagcaguguaacagguugaagagacuuuaaauuagaucaucugguacagagcuucucaaacuuggcacuauugauauuuuggg

SEQ ID NO: 4200366 - RNA, 90 nt, Human
uccagaagccaaagcaagggcugaagacucccuggucucuuucucuccauggcccaaggagaacagucaggucuuugguuagcuucagga

SEQ ID NO: 4200367 - RNA, 63 nt, Human
uccagaagccugccucagaugcacucacccuucuuggcaggcaucagggguagguguuuagga

SEQ ID NO: 4200368 - RNA, 105 nt, Human
uccagaauauguuacaaguauauuuguuaagauuauucagcaucaagguaaauuuuagcugaagggcuuuucacaauaucuuguaugacacaugcuucaauugga

SEQ ID NO: 4200369 - RNA, 58 nt, Human
uccagaaugcuuggaaccugaaguucuucaacagagaacaaauaggcaagcaucagga

SEQ ID NO: 4200370 - RNA, 78 nt, Human
uccagaccacauucucuuacauuuucucagccuugcucugugaguuagguaaagacagugaaagagggucaaaaugga

SEQ ID NO: 4200371 - RNA, 84 nt, Human
uccagaccccucaacuagcccaggaagugugccugagcaccucccaucuuucagggaucuggguucaccaugcuccugggugga

SEQ ID NO: 4200372 - RNA, 73 nt, Human
uccagagaauuaaacgugcuucauauuuuuagcuuaauuuauuagauuuacaagcacuguuuaaaugcuugga

SEQ ID NO: 4200373 - RNA, 109 nt, Human
uccagagagcucagagauuguuuuuggcaaaggacucaaagcaggcagauccaaccccucucgcugucucuuucuuguugccaaaacauaagacucuuaguuuuaugga

SEQ ID NO: 4200374 - RNA, 58 nt, Human
uccagagauaacuauuuaggagguuguuguuuucuuccugauuuuggucuuuuuugga

SEQ ID NO: 4200375 - RNA, 88 nt, Human
uccagagccaccggcugugucccacacgagguguaugugucugugugcucaugcuugugucuggacaugcacugcauguggcugugga

SEQ ID NO: 4200376 - RNA, 58 nt, Human
uccagagccuccuccagcugcaggucugggaucugaagcucagcugccagcucaugga

SEQ ID NO: 4200377 - RNA, 57 nt, Human
uccagagcuacuugcucaacuuauuaauaauuuguagaguguuauaguaguuuuggg

SEQ ID NO: 4200378 - RNA, 94 nt, Human
uccagaggagcuuguguuccaugcugugcaucuugaugacccaagccugaaggucacaaggguggcacagugggggagggcuuaagcaccugga

SEQ ID NO: 4200379 - RNA, 68 nt, Human
uccagagggccuccagggcagcaguggcuugucccgagcugauggcauaugacuggggguucccugga

SEQ ID NO: 4200380 - RNA, 85 nt, Human
uccagauaauguuaaagaggacagagugcuggauuuagugucaggaaugcugaaaucuuuaguuucugucccuuuuaccuaugga

SEQ ID NO: 4200381 - RNA, 102 nt, Human
uccagauacucuuuugaaggauuauguaacuaaguaauagcuuaaaagguaauaguuaauaucuuggcauguauuaguuggcaguuguugaaaaggagagga

SEQ ID NO: 4200382 - RNA, 56 nt, Human
uccagauccucaguguuucgcuuuuccccauggaauggcaccaggcuaggauugga

SEQ ID NO: 4200383 - RNA, 87 nt, Human
uccagauguaaagauggucccaaaaggacaugggaaguucuauuagggaacuauuuccaauuguucuuuggaaucucucucuuugga

SEQ ID NO: 4200384 - RNA, 60 nt, Human
uccagcacuggccugaguaucugugucaaucccagcauggguguccagggcgugucugga

SEQ ID NO: 4200385 - RNA, 75 nt, Human
uccagcagcucagggagagggcaccaagcaccugagggcuggaggcgagccucucacugggcgacuucagcuggg

SEQ ID NO: 4200386 - RNA, 56 nt, Human
uccagcagugcucaggacucacuaaugcagggagugacauucuaacacugacugga

SEQ ID NO: 4200387 - RNA, 57 nt, Human
uccagcccgacugggccugccggggcugccccgcgcacgguaaggcccggggcuggg

SEQ ID NO: 4200388 - RNA, 56 nt, Human
uccagccggcucugacagcuggggccaaggcucuucccagagaagagcuggaugga

SEQ ID NO: 4200389 - RNA, 56 nt, Human
uccagccguauguuauuggacauucagaugccuggggugcaugguguaugacugga

SEQ ID NO: 4200390 - RNA, 59 nt, Human
uccagccuaggggaacagcugcccccaguccacugugucccggcuuccccuagucuaga

SEQ ID NO: 4200391 - RNA, 59 nt, Human
uccagcuccagagaguccagcucuggggucaucuauccugggcagccucucuggaagga

SEQ ID NO: 4200392 - RNA, 71 nt, Human
uccagcugggauguugcacauggaacagauugaucuugaaaucugguccugaagucaacuucacagcagga

SEQ ID NO: 4200393 - RNA, 67 nt, Human
uccagcugguugaagaggagcuggacugugcucaggagcgccuggccacugcccugcaaaagcugga

SEQ ID NO: 4200394 - RNA, 77 nt, Human
uccagcuuuauuuccaaaggcuaaacucaguuugacagacagagcccuucacagacuguugucauuggagagcugga

SEQ ID NO: 4200395 - RNA, 62 nt, Human
uccaggaauagucauguuuuaggccuaagaucuauuuuuacaacuagaaagacuuucuugga

SEQ ID NO: 4200396 - RNA, 68 nt, Human
uccaggagauacacugcaccagccaagaagcacgaaacacaggaauggaaguggagugucuuccugga

SEQ ID NO: 4200397 - RNA, 58 nt, Human
uccaggagaucucgccauugucuggguugcagccaggggcccagacagauauccuggg

SEQ ID NO: 4200398 - RNA, 64 nt, Human
uccaggaggcagagaaaacuuccgucuguggcucucuagcagcaguggaaugucucuguuugga

SEQ ID NO: 4200399 - RNA, 57 nt, Human
uccaggagguagcgaguggacagugcagguuucugcagucccucucccugcucagga

SEQ ID NO: 4200400 - RNA, 61 nt, Human
uccaggaugagcaugauugaaaucacuaauuuauuucuauagcuucagucucuguccugga

SEQ ID NO: 4200401 - RNA, 61 nt, Human
uccaggcaaagccuuguagacguauucucguuauugagucuuuuucuuuaggguuucugga

SEQ ID NO: 4200402 - RNA, 63 nt, Human
uccaggcaccagugagaagggccuuucaccagacuugagaggucagcaagggugcucuaagga

SEQ ID NO: 4200403 - RNA, 92 nt, Human
uccaggccgcagucuggcuaaacuggauuaccaggcuggugggcagcuccucaccaugauccugcaccaguuagagccugcuguaguuggga

SEQ ID NO: 4200404 - RNA, 79 nt, Human
uccaggcucucgaucaccguggccacuuugagggagcggucgugcacacucagcuuggccuggacguagcgggccuggg

SEQ ID NO: 4200405 - RNA, 59 nt, Human
ugaaaagacugcaagagagcauuucagcacaauaggauugccucuuguucucucuuuca

SEQ ID NO: 4200406 - RNA, 79 nt, Human
ugaaaagcuccaguaggcugugugaggcuagagagcugaaccaaaagaucugccgacuauaagccaacuaguuuugcca

SEQ ID NO: 4200407 - RNA, 68 nt, Human
ugaaaaggagccuuagguagguuauauguauagcagauaucuuccccuacucuauggcuuccuuuuca

SEQ ID NO: 4200408 - RNA, 107 nt, Human
ugaaaaguggggaagcaaaucaauuguguagaugacucaagccaaagaaacugcccuugaguaucaauuacauaguuguuuugugcauucucuauggguacuuuuca

SEQ ID NO: 4200409 - RNA, 112 nt, Human
ugaaaaugcccuguaaacgaaacccacacagucccgugcuuaccauguuguugcaccuccuucauauggacuuuguaugugguuguauguauuuuuauagggcagauuuuua

SEQ ID NO: 4200410 - RNA, 71 nt, Human
ugaaaaugcucacuaaauaacaggaagaaugaacaacuauuuauaucuagauggauuuuagugaauuuuca

SEQ ID NO: 4200411 - RNA, 78 nt, Human
ugaaaauguaacucuuagauucauucuguuuuagagcuagaagcaucugaaagcaaauacaugaaucuugcguuuuua

SEQ ID NO: 4200412 - RNA, 111 nt, Human
uccuaaaaucccauagauaauaccaacuugcagccaaauuugagaaucagugcacuacccuaaauuuuucaguucaaaugaauuugguauuggucaaugagaggucaagga

SEQ ID NO: 4200413 - RNA, 81 nt, Human
uccuaacacugagaacuguuggugguccuucucccaugauggugaaagcagauacacuaaucaugugcucagugaaaggua

SEQ ID NO: 4200414 - RNA, 67 nt, Human
uccuaaggcuagugccugacuggguuacauuacuaaaugaaguuggugaguaggcuggcuugaagga

SEQ ID NO: 4200415 - RNA, 90 nt, Human
uccuaauccccauaacuuuugaauauguaugcuuaugugguaaaaacgacauugcagauguguuuaauguuaacaaucuugagauaagga

SEQ ID NO: 4200416 - RNA, 69 nt, Human
uccuacaaauuuggaaccucacacagaagcagcugcuauugcagaugcuuuugauucugggguguagga

SEQ ID NO: 4200417 - RNA, 70 nt, Human
uccuacacacaugaauuuauaaacugagagucauaccugcugcaguugcuacaguucaagugugaaagga

SEQ ID NO: 4200418 - RNA, 86 nt, Human
uccuacagaguucacaggauuuuaugagggcucaaugagucuacauacguaaaaugcuguuauauuauuuccgagucauguaagga

SEQ ID NO: 4200419 - RNA, 60 nt, Human
uccuacauagccagaagcaaguucauuaugacuuagaauauuguacaugguuaugcagga

SEQ ID NO: 4200420 - RNA, 72 nt, Human
uccuacgugggaaaaagcaggcuacugaggacaaaaaccucccaacccuccccaccuuguuuuccacuggga

SEQ ID NO: 4200421 - RNA, 69 nt, Human
uccuagaccuaguaucagacucugcugcuccucacuggcauaaaggcagacccugaacugggcaugggg

SEQ ID NO: 4200422 - RNA, 68 nt, Human
uccuagacugggcccaccuggcaguggccaugcuggggcuaucaccaggggcuggugcugagcugggg

SEQ ID NO: 4200423 - RNA, 58 nt, Human
ugacuguuaucugcacguagaguuuucugcuucagaaaauuaggcuagaugacauuca

SEQ ID NO: 4200424 - RNA, 116 nt, Human
ugacuguuuaccuucccucuuccauggaggcagcaagauuuuuaaagcaaggugagaaaucgcuuugucuuugaucauuuugacuuuguggaauuaaaugaccaggaugaaaguca

SEQ ID NO: 4200425 - RNA, 129 nt, Human
ugacuucauugaaaacgagcauucaguuuggcucucuuguaagguaguagaauacaauucaauaaagcucuguuuuguaccuuuuuggggggcaugcugguaguuccaugcuuguuuucucauuuggca

SEQ ID NO: 4200426 - RNA, 85 nt, Human
ugacuucuuugcagcuuagugauguuaucugaauuauuuuuauuguaugcagcauuaagcaauuugcuccuaagaaaacgaguca

SEQ ID NO: 4200427 - RNA, 59 nt, Human
ugacuugccugcacugagccuauucugcugauaagauaggcuuuugugcagagcaggca

SEQ ID NO: 4200428 - RNA, 78 nt, Human
ugacuugcguuuagcucuuuguagcuauuucuagucacugauucuauggaaagucgcuaaggaguuagucgcuuguua

SEQ ID NO: 4200429 - RNA, 56 nt, Human
ugacuuucagcuguauuuaucuaggauuaaucuuggaagaguagaguugaauaaca

SEQ ID NO: 4200430 - RNA, 77 nt, Human
ugacuuuucauccccuucacacccucugcauuucccuuuuggagagcucagagggaggugaagugggaagaaaauca

SEQ ID NO: 4200431 - RNA, 129 nt, Human
ugacuuuuggucauguuuuaguugguauuugcuucugugggugccuauggcugaagguaaauguuuguuuucuuaaccugggcaucaacaagcagagaugacauaaaaaugaguuuagauugaaaguua

SEQ ID NO: 4200432 - RNA, 62 nt, Human
ugagaaaagguugagaugauaauuuccuuuucauuuuauuugucuucauuaaucucuucuca

SEQ ID NO: 4200433 - RNA, 55 nt, Human
ugagaaagaugucuaggaaauaugcccauaguuucuuucuugaacauguuucuca

SEQ ID NO: 4200434 - RNA, 83 nt, Human
ugagaagagcuacuugugaauggacaauuaaaucuagauguauuuagaucugauacaauucaucuguagccaaccuuuuuuua

SEQ ID NO: 4200435 - RNA, 70 nt, Human
ugagaagagcuggauggaaucugggaugaguaacaugaguauccguaggaagaccaccaguggcuacuca

SEQ ID NO: 4200436 - RNA, 91 nt, Human
ugagaagauggaaauucauuuacauaacaguaacgcugaaucaauauauuuucagcuugcccugauguggaagaaauauaccaucucauua

SEQ ID NO: 4200437 - RNA, 62 nt, Human
ugagaagauggucaucugaaagccaggaaaagagacugcuccagaaccugaccaugcuggca

SEQ ID NO: 4200438 - RNA, 84 nt, Human
ugagaagcaauauccuaaaugaagcuggauguaggaucccccuguuguauaauggaguuuuguauccagcuucagcuuaucuca

SEQ ID NO: 4200439 - RNA, 77 nt, Human
ugagaagcacugugcaucuagucucaggcuucagagagaauucccuuucuagucuauggcuagauaguugucacuca

SEQ ID NO: 4200440 - RNA, 99 nt, Human
ugagaagcagaagucuaugaaauuuuaggaggucgauuguucacaccuauuugcaagacuucauuguaauauuauagcaccuucuuccaucugcucuua

SEQ ID NO: 4200441 - RNA, 55 nt, Human
ugagaaggccagaaaauuccuuuaggggccugaaggcuuggauuggucauuuuca

SEQ ID NO: 4200442 - RNA, 66 nt, Human
ugagaaggugaaaguguggagaaaagauguccuucccucagccaugacacaucuaucacauuuuca

SEQ ID NO: 4200443 - RNA, 62 nt, Human
ugagaauauaauuuuauuccuagaguuuuaaugugugggcucuaaaauggaguuuuaucuca

SEQ ID NO: 4200444 - RNA, 90 nt, Human
ugagaaucgcuugaacccaggagacagguugcagugagcugagaucgcgucacugcacuucagccugggugacagugcgagacugucuca

SEQ ID NO: 4200445 - RNA, 98 nt, Human
ugagaauucuggggcaagaaaguguuuacauugcuauaagagguauuaagaacggcuuccuguauuagguagacaacuauuuuuccauuaguuuucca

SEQ ID NO: 4200446 - RNA, 99 nt, Human
ugagacaaagucucgcuuuguagcccaggcggagcuugcagugagccgagaucacgccacugcacuccagccugggcggcagagcaaaacucugucuca

SEQ ID NO: 4200447 - RNA, 97 nt, Human
ugagacagagucucugucgcccagguuggaguucaguggcgcgaucucggcucacugcaagcuccgccucucggguucacgccauucuccugccuca

SEQ ID NO: 4200448 - RNA, 102 nt, Human
ugagacagaguuucgcucuugaccccgaggcuggagugcaguggccugaucuuggcucacugcaaccucugccucccggauucaagcgauucuccugccuca

SEQ ID NO: 4200449 - RNA, 107 nt, Human
ugagacagaguuuugcucuuguuguccaagcuggagugcagugcaauggcgcaaucuuggcucacugcaaccuccgccuccuggguucaagugauucuccugccuca

SEQ ID NO: 4200450 - RNA, 99 nt, Human
ugagacaggagaauugcuugaaccagggaggcggagguugcagugagccgagaucgugccauugcacuccagccuggggaacagagcaagacugucuca

SEQ ID NO: 4200451 - RNA, 59 nt, Human
ugagaccaucuguuuaaagcagugugcacagaacuuggcacacaaacagauggugcuca

SEQ ID NO: 4200452 - RNA, 57 nt, Human
ugagacgaagucuugcucuguugccaagcuggagugcaguggcacgauuucggcuca

SEQ ID NO: 4200453 - RNA, 101 nt, Human
ugagacggagucucgcucugucacccaggcuggagugcaguggcgggaucucggcucacugcaagcuccgccucccggguucacgccauucuccugccuca

SEQ ID NO: 4200454 - RNA, 101 nt, Human
ugagacggagucuugcucugucacccaggcuggagugcaguggcuugaucucggcucacugcaaccuucgccucccggguucaagugauucuccugccuca

SEQ ID NO: 4200455 - RNA, 101 nt, Human
ugagacggugccuugcucuguuucccaggcuggaaugcaguggugugaucuuggcucacugcagccuccaucucugggguucaagcgauucuuccgccuca

SEQ ID NO: 4200456 - RNA, 57 nt, Human
ugagacugauugauagauggaagacauaaaacgaaacuucuaucucuucaaguuuca

SEQ ID NO: 4200457 - RNA, 129 nt, Human
ugagacuggggggcauuuuaugguuauaagagcuaaaugauauuuaugcaaguguguaaacauuaauaacucagcguuuauaagcauguuagaauauuugauuauggcuagggaaaugcauauuagcua

SEQ ID NO: 4200458 - RNA, 75 nt, Human
ugagacuuugggugauccaguccauggcagaacccaaaugagaacugccuggcugagaccuucccaaauucuaca

SEQ ID NO: 4200459 - RNA, 77 nt, Human
ugagagaaaauagcacagcagcugaggcuugguuugaggacuucuagcuuuuauauuguauguguuuaauuuuuuca

SEQ ID NO: 4200460 - RNA, 69 nt, Human
ugagagaaacguuccuuacauccuccuccuccacagcaaaaugguuucaggguguggggacaucuguua

SEQ ID NO: 4200461 - RNA, 71 nt, Human
ugagagacagcagggccagggccugccagcaaagucuucaaugcucacagccccaucaccuguugcucuca

SEQ ID NO: 4200462 - RNA, 57 nt, Human
ugagagaccugugaguguauuucagaaggccaugaaauguugccaugaggucuccca

SEQ ID NO: 4200463 - RNA, 123 nt, Human
ugagagauugaagggaaggaugaaaggagugaaauuuucacugacgggugaaaaguaaccaauauuggguauagcucagcaccccgacaggacauucuuugucauaugcuaaucaauuuuuug

SEQ ID NO: 4200464 - RNA, 80 nt, Human
ugagagcaaccaccuaacaguggggaaaagaguugguggagaagcaccaccaucuugcccuccuugagugggaacuuuua

SEQ ID NO: 4200465 - RNA, 65 nt, Human
ugagagccuguguucaaaugccagcucuguccuuucccgcugagucaccuugaacaggcuacuca

SEQ ID NO: 4200466 - RNA, 74 nt, Human
ugagaggggauggguauguuuguggccuugauggugguaaugauuucacagguacauccuuauccccaaacuca

SEQ ID NO: 4200467 - RNA, 117 nt, Human
ugagagggugcuggaaggaugugcauugcaggugcccagcuggcuuccagcacaucccaaggggaugaaugugggggccacugugcaccugccuuuuggaccagacuuucucucuca

SEQ ID NO: 4200468 - RNA, 62 nt, Human
ugagaguggcaucccuuuaacaggguagagucccucuggcuuugaauggcugccacuuauca

SEQ ID NO: 4200469 - RNA, 55 nt, Human
ugagaguucucucuucaggugggaaguauaaagccuucuccaccugcagcucuca

SEQ ID NO: 4200470 - RNA, 61 nt, Human
ugagauaagcaaggauaaagguuuggaggcaaggcagacaccacaauuccugcuuaucuca

SEQ ID NO: 4200471 - RNA, 72 nt, Human
ugagauaagugauacauaaaaagacaaaacacuuuaaaugggugaauuguacaguaugugaauuauaucuca

SEQ ID NO: 4200472 - RNA, 126 nt, Human
ugagaucagacuccugcccaaagagagauguccaagaggucugagcaaucucaagccuguaucuaaggcuaaacugugaucuucaguccaucaaagucucuuuuucugcuagucuuucccaucuca

SEQ ID NO: 4200473 - RNA, 55 nt, Human
ugagaucauugacuuguuccugggggccucucucaaggacgagguuuugauuaca

SEQ ID NO: 4200474 - RNA, 64 nt, Human
ugagaugaacuugauuguuuuaggacuaaauguuuuuauucaauugacaauuagagaucacuca

SEQ ID NO: 4200475 - RNA, 74 nt, Human
ugagaugaagugauguaaaacauggggcuacuguuuucucuccaucuccccucgccuugccucgccucaccuca

SEQ ID NO: 4200476 - RNA, 111 nt, Human
ugagaugaauacaugcuuuauaaugguaauuucacauauaggggaagcuacaacagcaguauaucauggcagcuucuuaauauggagaccaaggccuaacuauucaucuua

SEQ ID NO: 4200477 - RNA, 57 nt, Human
ugagauggaaggugaggcaguagacucugaagucagaaagccuaccuuuguaucuca

SEQ ID NO: 4200478 - RNA, 58 nt, Human
ugagauggagucucacucuguugcccaggcuggagugcagcggagugaucucugcuua

SEQ ID NO: 4200479 - RNA, 58 nt, Human
ugagauggagucucgcucuguugcccaggcuggcgugaaauggcgugauuucggcuca

SEQ ID NO: 4200480 - RNA, 57 nt, Human
ugagauggagucucgcucuguugcccaggcuggggugcaguggcgagauccggcuca

SEQ ID NO: 4200481 - RNA, 57 nt, Human
ugagauggagucucgcucuguugcgaggcuggaauagaguggugcgauuucggcuca

SEQ ID NO: 4200482 - RNA, 100 nt, Human
ugagauggagucuucuucuguuacccaggcuggagugcaguggugugaucucagcucacugcaagcuccgccucuggguucaagagauucuccugccuca

SEQ ID NO: 4200483 - RNA, 90 nt, Human
ugacuugcagcagccuaugguacucucuugucugcaaauuuucugcccugauuaauuacaaagagugccagaguguguugacguuaguua

SEQ ID NO: 4200484 - RNA, 67 nt, Human
ugacuugccuaaagaacaaauggucuugaagaaaauucacguguuuauugcaucuuaguguaaguca

SEQ ID NO: 4200485 - RNA, 81 nt, Human
ugacuuggcuggcuuucuuguauuuacuuugauggaccuaggguuagggcuuuuguagguacuagagaccagaugugguca

SEQ ID NO: 4200486 - RNA, 60 nt, Human
ugacuuucaagguaugccugggcuugcccuccuggguucugccauugccaugagggcuca

SEQ ID NO: 4200487 - RNA, 90 nt, Human
ugacuuucgccuuguugcaacugauggagcaugugugcuuccucugaggccagccuacaggaggcagcuguuucgcagguggugaauucg

SEQ ID NO: 4200488 - RNA, 57 nt, Human
ugacuuucuaagcuuaguaugaggcaguaaauguacugcagcuaguuggggaaagca

SEQ ID NO: 4200489 - RNA, 88 nt, Human
ugacuuugaaucggcuggaccuagacuagcucauagaucuagaacaaguauuggcagucuaguguccuugggccccuuugaucaguca

SEQ ID NO: 4200490 - RNA, 73 nt, Human
ugagaaagaaggacucugcauuuuccuggcucucuccucuacuugcuuaggcauccaggguucuuccgccuug

SEQ ID NO: 4200491 - RNA, 58 nt, Human
ugagaaagguauuucaugcacuuaagagagagacagagaguaugaaaguccacucuca

SEQ ID NO: 4200492 - RNA, 68 nt, Human
ugagaaauuaccauuguaaaguauuucuacacuuauuauuaagaaagucucauugugguaguuucaca

SEQ ID NO: 4200493 - RNA, 68 nt, Human
ugagaagagaagaaagugucuacacagaaguuaguuuuuguuuaauuugauauuuucucuuuaccucg

SEQ ID NO: 4200494 - RNA, 66 nt, Human
ugagaaggaugggcaagauuuccccaugugagaauccuuuaugugcauuaucuaguucauuucuua

SEQ ID NO: 4200495 - RNA, 60 nt, Human
ugagaaucauccagaggcuucuuaaaauaugcacuaugaggccucauccucagauuuuca

SEQ ID NO: 4200496 - RNA, 84 nt, Human
ugagaauuacugacuguggggggcggacacaaggggucagcugaggagcgcaguuugugacuuucccuauaggcagugaccucg

SEQ ID NO: 4200497 - RNA, 70 nt, Human
ugagaauucuggaguugggaggaaaauagaaaccauaauauauuaauuccuaccaaacuuugaguucuca

SEQ ID NO: 4200498 - RNA, 65 nt, Human
ugagaauucugggucuaggguuguaucuguaaagggaggcagcccacaggacacaggaaguauca

SEQ ID NO: 4200499 - RNA, 101 nt, Human
ugagacacagucuugcucugucacccaggcuggagugcaguggugccaucucagcucacugcaaccuccagcucucagguucgagcgauucucaugccuca

SEQ ID NO: 4200500 - RNA, 102 nt, Human
ugagacagaguuuugcucuuguuccccaggcuggagugcagugguacgaucucggcucacugcagcuuccgccuccuggguucaagcaauucuccugccuca

SEQ ID NO: 4200501 - RNA, 65 nt, Human
ugagacagauggagcuacuagguaaagcaucauuauugcuguuucagucucuauuugaaacauca

SEQ ID NO: 4200502 - RNA, 62 nt, Human
ugagacagcccuucugcacaggggaggauaaaacucaagaugcuuucuuggagggcuucuca

SEQ ID NO: 4200503 - RNA, 59 nt, Human
ugagacagcuguggagaggcauguguuagugcuccagccaacagucccagcugagcuua

SEQ ID NO: 4200504 - RNA, 101 nt, Human
ugagacaggagaauugcuugaacccuggaggcggagguugcagugagcugagcacaugccacugcacuccagccuaggugacacagcaagacuccaucuca

SEQ ID NO: 4200505 - RNA, 64 nt, Human
ugagacauauuauacugcuuuuaucuuuacuuuugaaaggcaaugcagucauggaaugcucuca

SEQ ID NO: 4200506 - RNA, 106 nt, Human
ugagacggaguuucgcucuuaucguccaggcuggagugaguguaguggcuugaucucagcucacugcaaccuuugccucccgggcucaagcgauucuccugccuca

SEQ ID NO: 4200507 - RNA, 64 nt, Human
ugagacgugggucuucccuuggcuguguuuaauucacucuucuauggaauaccaaugauucuca

SEQ ID NO: 4200508 - RNA, 88 nt, Human
ugagacugggaaggagggcaggaacuggcaggcagggcaggggccuggccuggccugcucggcucuuaaguccuggcuucaccacuca

SEQ ID NO: 4200509 - RNA, 129 nt, Human
ugagagaagaaggcucugauuuccuaaccucuagcugcauauuuuauccauuagaccucugcuuucuggugaaaacugcauaugcacugauaguuugggaacacugcaauuagaucacuuugccuuuua

SEQ ID NO: 4200510 - RNA, 70 nt, Human
ugagagaagggauucuaaugaaaugagccccaaguucaauuugaauuucuuauugggagaccuuuucuca

SEQ ID NO: 4200511 - RNA, 57 nt, Human
ugagagaaugacucgacagaggucugcaucaggcaaucucaggcgagaauucuuuua

SEQ ID NO: 4200512 - RNA, 63 nt, Human
ugagagacugaacuagcacauuuuuauaaaacuggaucaaaaugugcuugugaucagcuguca

SEQ ID NO: 4200513 - RNA, 79 nt, Human
ugagagacuucacuagcaugguacaauguuaacauaaaaagaagaaugucagcugugauccaucuaucuagucuucuca

SEQ ID NO: 4200514 - RNA, 79 nt, Human
ugagagaguuuguugcccuuaggauuccagauaaaugacagcguuguauuuauauuagaaugguugcuuaacuuucuca

SEQ ID NO: 4200515 - RNA, 60 nt, Human
ugagagccagaagggccugagguugaagcagccgugccucuucaucuugugagcuacuca

SEQ ID NO: 4200516 - RNA, 68 nt, Human
ugagagcugggcaaaaugugagguugcugcacagcaaugcagugaagccucaccugcucaguaucuua

SEQ ID NO: 4200517 - RNA, 73 nt, Human
ugagaggaaaugucacuuguccaauguuaugcuauucccuaaauagcagagcaugcuaagugacuccaucuua

SEQ ID NO: 4200518 - RNA, 86 nt, Human
ugagaggguggacagggguggucuggggcugagggugguguucucuugggagcugugcacuuccagauggccccaucuaaucucca

SEQ ID NO: 4200519 - RNA, 60 nt, Human
ugagaggucaaagggcauggagcugaaagaaacaucuggauuccaucuuuugaacuuuua

SEQ ID NO: 4200520 - RNA, 107 nt, Human
ugagagucucagccuuuuucuuccugccaaguuacuuuuuuauuagguagauaaacuccugaauuguugagaagcagcuguuugaagaaggauuuggcugauucuca

SEQ ID NO: 4200521 - RNA, 81 nt, Human
ugagagucugcugccucgacauugggacaaauaagacucuugccugucaacaagauguuccgauguuggaggagggcucca

SEQ ID NO: 4200522 - RNA, 63 nt, Human
ugagagugcaaauuauuuaccugauuuagauugauuaaagucaggcaugcugucugcauuuca

SEQ ID NO: 4200523 - RNA, 64 nt, Human
ugagaguuccaaugguaaaauugugggcguuauuuauuuuccauauauuucuuaagaacuuuca

SEQ ID NO: 4200524 - RNA, 79 nt, Human
ugagauaggcacaauuauuaucucuuucuacagaagaggcaaugaagacaaagagaugguaagugaauuaugcauucca

SEQ ID NO: 4200525 - RNA, 100 nt, Human
ugagauauagucuugccugucacccaggcugguaugcaguggcacgaucucggcucacugcaaccuccgccucccggguucagacaauucuccugccuca

SEQ ID NO: 4200526 - RNA, 83 nt, Human
ugagauccacagguccaguguguuuaucuuggauuauaaaucuacuuuuuggcuggacacaguggcucaugccuggaaucuca

SEQ ID NO: 4200527 - RNA, 58 nt, Human
ugagaugaaagcagaaagacuucaguguacauuuauugagucugacauuuuucucuca

SEQ ID NO: 4200528 - RNA, 66 nt, Human
ugagaugaacagucagcuucucgggacauuugcauuagcagaggucuuugccagcgaccacucuca

SEQ ID NO: 4200529 - RNA, 73 nt, Human
ugagaugccauuuuauacucauucaauuuacaaaaaucaaaaaguuggagaggaugugaauggcagagucuca

SEQ ID NO: 4200530 - RNA, 58 nt, Human
ugagauggagucucacucuguugcccaggcuagagggcagcagagcagucuccgcuca

SEQ ID NO: 4200531 - RNA, 57 nt, Human
ugagauggagucucgcucuguugccaugcuggagugcaguggcgcgaucuccauuca

SEQ ID NO: 4200532 - RNA, 58 nt, Human
ugagauggagucucgcucuguugcccacgcuggaguacaguggcgcgaucuccgcuca

SEQ ID NO: 4200533 - RNA, 58 nt, Human
ugagauggagucucgcucuguugcccaggcuggagcacaguggagcgaucucgucuca

SEQ ID NO: 4200534 - RNA, 101 nt, Human
ugagaugggaggaucguuugagcccaggaggucgaagcugcagugagccauggucacgcuacugcacuccagccugggcaacagagugagacccugucuca

SEQ ID NO: 4200535 - RNA, 69 nt, Human
ugagauggugcuguucaaaacuaaaugauucaaaauucuuuuuguguaacuuaugaauagcuucaucca

SEQ ID NO: 4200536 - RNA, 105 nt, Human
ugagauguuacagucacccagauuacauccugucaaaagguccucacaaacuaguaaugaaagacaaccugucaggaguagucauggaguuguuacacacuuuua

SEQ ID NO: 4200537 - RNA, 80 nt, Human
ugagauucuaauagcugccuauguauuuguguucacaaucagguguacaccaaacggagggcaaaugcuguuaccacuca

SEQ ID NO: 4200538 - RNA, 65 nt, Human
ugagauuguuugcauuuugggaaaugccagucaucucucccaaaucugcagauagcagcaucuca

SEQ ID NO: 4200539 - RNA, 89 nt, Human
ugagauuuuuaugcaucucugaaaugcaguuaucuuuucuuacaacaaaugaaagcugaagauaggcauuucagcaugccaagaccuca

SEQ ID NO: 4200540 - RNA, 62 nt, Human
ugagcaagagugaauucauguggcuucagggaacagaacugaggcugauugauuuuugcuca

SEQ ID NO: 4200541 - RNA, 60 nt, Human
ugagcaaggagcagucuuucuuucuaaaauacuagucugguucugcuacucucuugcuua

SEQ ID NO: 4200542 - RNA, 86 nt, Human
ugagcaaugacaccaagaaguugacagccaggugaauguuauacacaagcucaucggcugucaucuucacgugaccaacagcuaca

SEQ ID NO: 4200543 - RNA, 80 nt, Human
ugagcacauuuccaggacuagcauuucugauagacuugacuugggauaagaauguuuauugcagugcugggcuguguuua

SEQ ID NO: 4200544 - RNA, 63 nt, Human
ugagcagaauuuaugacaacgauagccauccgggcuguugacagacauagguuuucuuguuua

SEQ ID NO: 4200545 - RNA, 58 nt, Human
ugagcagaggccagcaccugggagauagagcaguccaguggugaaaagcuucagcuca

SEQ ID NO: 4200546 - RNA, 70 nt, Human
ugagcagcugguuagcaaucuaagugagauuccuaugucugacuaagucagauugcuaaccagcugcuca

SEQ ID NO: 4200547 - RNA, 118 nt, Human
ugagcagcuguuacauuccaaguacacugugcuaguccauuuuacauguguucucuaacaaaaaccuaacaguagauuuuagauuacauaguuggagagguauauuaguccaugcuca

SEQ ID NO: 4200548 - RNA, 56 nt, Human
ugagcaguggcuccugcuggaccuucuuugcaucauccagcuccugccacuccuua

SEQ ID NO: 4200549 - RNA, 103 nt, Human
uccuagagggcauagcagguauagaagggagugauccaggaggacacuggucacaagaauguccuccuggaucacucccuucuauaccuaccauacccuagga

SEQ ID NO: 4200550 - RNA, 93 nt, Human
uccuagaucagcagauuccagucccacccccuugucccagauggagaaacugaggcccauuugcagaagggagggggaccuguugauuaggga

SEQ ID NO: 4200551 - RNA, 72 nt, Human
uccuagcccagggucaccaguucauaggcacagagauuggauccuaggucugucugaccccagaggcuggga

SEQ ID NO: 4200552 - RNA, 55 nt, Human
uccuagcucaagguuuuccauauauuuaauagucaguauaugcuugagcuaagga

SEQ ID NO: 4200553 - RNA, 96 nt, Human
uccuaggcagaugucccucuaguuguuuaauauugauugacuacccacagugggacucuuagauuaagcacacaaaaugggcucugcccuuuagga

SEQ ID NO: 4200554 - RNA, 78 nt, Human
uccuagugccccaagagggcuguggucucauuuagccuuggagggcuguggucucaucuagccuuggggugugaugga

SEQ ID NO: 4200555 - RNA, 70 nt, Human
uccuagugccugccccaaaaugaaagggauuuuucucagcuccuuucagaaggaugugcagguggcaggg

SEQ ID NO: 4200556 - RNA, 64 nt, Human
uccuaguguggggucaccggcccaggggguugcuauccuagguuuuuccugaccucaaccaggg

SEQ ID NO: 4200557 - RNA, 70 nt, Human
ugauaggaugggcagacaggacggcaccagccaugguugcuggcucucccuggcaugccucauuucuuua

SEQ ID NO: 4200558 - RNA, 57 nt, Human
ugauaguaucugauuauuucacaguuaguuuugggaauaauauuacagauacaguca

SEQ ID NO: 4200559 - RNA, 129 nt, Human
ugauaguauuucauuaaguuuuuugccaggaguaagugaguuaaugugucugacacaaugggucuggcacacaaggccuaugcauauauugauuacuguuucagccucagaacuuuaagaaguauuaca

SEQ ID NO: 4200560 - RNA, 93 nt, Human
ugauaguccuacauuaugggguuguugucaggauucagugaguuaacaaagauauggaugcugagaacacugccugauacauuggacacauca

SEQ ID NO: 4200561 - RNA, 62 nt, Human
ugauagugagucauagcugaguuuucgucaguuuacccaauugaccagcugucucauuuuca

SEQ ID NO: 4200562 - RNA, 56 nt, Human
ugcacaagcuuugugauaguagagaucuccuucuauucuggguucaaagcuuugua

SEQ ID NO: 4200563 - RNA, 63 nt, Human
ugcacacagaugguacaugcauauccagaugcacacgcgcacugacguguccaccugugugca

SEQ ID NO: 4200564 - RNA, 129 nt, Human
ugcacacaugacuuauaauacauauauacguauugcaugcauauaugcuacaugcaacauaugcuauaaacauuuugcaugugugcauauauuugcaucacauauguguacauguauacaugugcugca

SEQ ID NO: 4200565 - RNA, 68 nt, Human
ugcacagauacagaagaccccuccgucaugcagcaucugccaugagcaucggccuccugugcugugca

SEQ ID NO: 4200566 - RNA, 68 nt, Human
ugcacagcacaggaggccgaugcucauggcagaugcugcaugacggaggggucuucuguaucugugca

SEQ ID NO: 4200567 - RNA, 59 nt, Human
ugcacagcagggcauggcuguuguucgcugaagggcagagaagugccuugcugguugca

SEQ ID NO: 4200568 - RNA, 63 nt, Human
ugcacaggguuggccuagucagagacuuuuccugccugucucugacccuagcaucucugugca

SEQ ID NO: 4200569 - RNA, 55 nt, Human
ugcacauaaaguugagacagagauggagacaucucagccucaccucuauggagca

SEQ ID NO: 4200570 - RNA, 73 nt, Human
ugcacauaauccauuugcacugcagacaauuuuaggaugugguuuacaguaagguggaugguaccuuauggca

SEQ ID NO: 4200571 - RNA, 81 nt, Human
ugcacauaguuaccucgauuaaaaaauaaguuuuuggagcuauaaauuuucaaacacugcuuugagagggucugucaggca

SEQ ID NO: 4200572 - RNA, 67 nt, Human
ugcacaucuggcauguaugggcagccacaaacauugucauauuaugcacaugcaugcacagguugua

SEQ ID NO: 4200573 - RNA, 62 nt, Human
ugcacaugaggagaccaaggccugauguuugaacucagccccaauucuccccauucagugua

SEQ ID NO: 4200574 - RNA, 67 nt, Human
ugcacauuauaaacacuaccugucaucauccuaagaaguguggugcaguugauaguuuuagugagca

SEQ ID NO: 4200575 - RNA, 58 nt, Human
ugcaccauauuguuuuaaauaaauugugccacaggccauaugaaacaagaauggugca

SEQ ID NO: 4200576 - RNA, 68 nt, Human
ugcacccugacggugggcagcuugagugucuaaaccuucggcccucaggaggucugcugcggggugca

SEQ ID NO: 4200577 - RNA, 58 nt, Human
ugcacguauggcaguggagcccccauaagccugggcccuugaguggccaugaugugca

SEQ ID NO: 4200578 - RNA, 75 nt, Human
ugcacucuaacaaagagacuacgguggaguuuauagaagcuucuacaacgugguuuuguuguauauagaugugua

SEQ ID NO: 4200579 - RNA, 69 nt, Human
ugcacucugaggagugacuagaggugagcuugaaagggaggccucguguguccuccgguggaacgugca

SEQ ID NO: 4200580 - RNA, 69 nt, Human
ugcacucugggaauccucaccuuccagugaacacaccccaugaggagcaguguggauuccacggcagca

SEQ ID NO: 4200581 - RNA, 63 nt, Human
ugcacugauguuuugccaaggaagcaugacucugguuucaucuggcuaauggcuuugcgugca

SEQ ID NO: 4200582 - RNA, 62 nt, Human
ugcacuuccaaauaccaucacauuguguguaagggcuucagcaugugaauuugggggugaca

SEQ ID NO: 4200583 - RNA, 58 nt, Human
ugcacuucgcgcacaggugccagcuguuaccucgccgggcagcugaccgcgcggugca

SEQ ID NO: 4200584 - RNA, 71 nt, Human
ugcagaaaaacauuuaaagaaauauugugcaaucuccccaguuuggcacaauuuuccuuuaaguguaugca

SEQ ID NO: 4200585 - RNA, 59 nt, Human
ugcagaacgcucccccaggaggcuggcuggcucggccagguuggguggaaguggcugua

SEQ ID NO: 4200586 - RNA, 76 nt, Human
ugcagaacucauggcaucuaccuguguacuuugcgccacaucacaguaaaguguaaaagcauguuagggaguugca

SEQ ID NO: 4200587 - RNA, 59 nt, Human
ugcagaaucuaauguaaaacagacuugcauaaggaugaggucuuauugcaguaguugca

SEQ ID NO: 4200588 - RNA, 62 nt, Human
ugcagaccaagccuuccaggucaucagucaccacguggcccuuguccugggagaguucugca

SEQ ID NO: 4200589 - RNA, 101 nt, Human
ugcagacguggccucugcucuuagagaguuguugaucaggagguagcagauagguagguaaucugaggacauuuuuuucagcagcauaggcaaaaauugua

SEQ ID NO: 4200590 - RNA, 78 nt, Human
ugcagacuaauaaagcagaugcagcuaauaaagcagcuaguugauuugguggcuacauuuguaauauuuuagugagca

SEQ ID NO: 4200591 - RNA, 88 nt, Human
ugcagacucuccucugccugcccaccugggcucuagacugaccaagaccccaccaggcugugggcagugccugacggaugagcugaca

SEQ ID NO: 4200592 - RNA, 68 nt, Human
ugcagacuguaccuggaagagggccugaucucgggaaagacaguuuucuucagccaagguaaucugca

SEQ ID NO: 4200593 - RNA, 59 nt, Human
ugcagagaagaguaucuuuucacacuugaucuguaaaaucaaguugcuuauucugugca

SEQ ID NO: 4200594 - RNA, 63 nt, Human
ugcagagauagaacuacuuucugaugacuuuuuucuguucucuuaaggugguuugucucugua

SEQ ID NO: 4200595 - RNA, 113 nt, Human
ugcagagcuauuguuuuucuaaucucauuguggagcuaagagagagauuguguuuaagguuuccuucguaauagguuuucuugcuccaggaaggaugcgugacagacucugca

SEQ ID NO: 4200596 - RNA, 64 nt, Human
ugcagaguagcuauaccauuuucuacucccaucaggaauauaugaguggucuaguuucucugca

SEQ ID NO: 4200597 - RNA, 92 nt, Human
ugcagaguuccuuuugggugauugcuuuuaagcaccaccuaagcccaucccagcuuagcccuuggaaagcaaugccuagagacauuucugca

SEQ ID NO: 4200598 - RNA, 84 nt, Human
ugcagauggagacaagagggcuaucaaggaggcaacugccaagugagccaaacuucuccuuggucuuugauucuucaucaagca

SEQ ID NO: 4200599 - RNA, 93 nt, Human
ugcagcacuuuuugccuccugacgucacuucuuagucuauuuucugugucuacacuaguaggucagacauaagaggacaaggauguugcugua

SEQ ID NO: 4200600 - RNA, 55 nt, Human
ugcagcagguuccaaaggguuacuuuuagaaaugaacuacccucaaucuccugca

SEQ ID NO: 4200601 - RNA, 69 nt, Human
ugcagcaugguggagcugcucuuuaaauaccgaaaugcacaugcuuaaagacuagaagccguggcugca

SEQ ID NO: 4200602 - RNA, 62 nt, Human
ugcagcccuggaguaccguggccauccagccuguggguggugggcacagugcccaggcugca

SEQ ID NO: 4200603 - RNA, 122 nt, Human
ugcagccuguuugcaggaaucucugggaaagcuauagggucaagcauuugauucacaaauauuuaucaagcgucuacccuuugcgcuguucuucagauaagugauucucaaauuuugcugca

SEQ ID NO: 4200604 - RNA, 61 nt, Human
ugcagccuuggccgugacuccucucugcguuuucccugcaguagugcaugggcgaggugca

SEQ ID NO: 4200605 - RNA, 59 nt, Human
ugcagcuccaugugccgagugcccacagucccagggccuggcacacaaggggugcugca

SEQ ID NO: 4200606 - RNA, 118 nt, Human
ugcagcuccucucauaugcuauuugcaaagucccugggauggaauggacuaauuuuuaaaaugaaaaccuuuccuuuaucuuuccagaggaauuuuuagauagaaauggucugcugca

SEQ ID NO: 4200607 - RNA, 77 nt, Human
ugcagcucuucaggauuuucccaaggcucuggcaauccaauauuuccagcugcccaagaggcauccugcuuggcuca

SEQ ID NO: 4200608 - RNA, 83 nt, Human
ugcaggaaggaggaaccagaggaggaauuaccuuccgucuguggaguagagucccgucuucuggagucugugaccuuccugua

SEQ ID NO: 4200609 - RNA, 59 nt, Human
ugcaggaaguuuccugaacuuuuagaaguugcauuacugaauacagguuaccuuuugca

SEQ ID NO: 4200610 - RNA, 95 nt, Human
ugcaggaauccuuagugaccaauacuguggaugccagcaguggcagugaggauugcugaggucuuugaugguguuggcugcuaaggucuucugua

SEQ ID NO: 4200611 - RNA, 56 nt, Human
ugcaggagaaaguacggagcguuuagcuuuagcuggcauuuuguguuuauucugca

SEQ ID NO: 4200612 - RNA, 58 nt, Human
ugcaggagggaggguuacaguuucuaaaaagagcuggaaagacacugcucugcuggcg

SEQ ID NO: 4200613 - RNA, 78 nt, Human
ugcaggaggucauagcugugcagguagccaaguaccgugcaguacugcaaaugccuugacaguuguaagaccucugca

SEQ ID NO: 4200614 - RNA, 71 nt, Human
ugcaggauugccucaggcuagcuacugucccuuaacuaaaggucacagcuuucucgugaggacucucugua

SEQ ID NO: 4200615 - RNA, 77 nt, Human
ugcaggcaaagaaagguaaauacaugcuuggauccuaugucaaucacaggcacaauuauuucccuuuccauagugua

SEQ ID NO: 4200616 - RNA, 77 nt, Human
ugcaggcagaguaaugaauagaugguggcaggucuuauuagucuccgaaaaaccucugauuuauguugugccacgca

SEQ ID NO: 4200617 - RNA, 55 nt, Human
ugcaggcaguaggccagcuccaggggccacacugcuuucugccggcuguccugca

SEQ ID NO: 4200618 - RNA, 57 nt, Human
ugcaggcauuggugagagaagcagagaauguuagcuuccuccuuacuguuguuugua

SEQ ID NO: 4200619 - RNA, 62 nt, Human
ugcaggcauuucgcaaaggcugagccucuccaggaggcacauuuuuuguagaaguggcuuca

SEQ ID NO: 4200620 - RNA, 63 nt, Human
ugcaggccauucaggagaugugccuuucagagaaggauucaccucaaaagaguggacgcugca

SEQ ID NO: 4200621 - RNA, 58 nt, Human
ugcaggccuggacugaugugguaaugggcagcugaauucggguacucuaggccaggca

SEQ ID NO: 4200622 - RNA, 82 nt, Human
ugcaggguauaauacuuaggugauggguugauaggugcagcaaaccaccauggcacaaguuuaccuauguuauaaaccugca

SEQ ID NO: 4200623 - RNA, 68 nt, Human
ugcagguauggaagaauaauuuugacauuaaagccacgccauucagauuuauuugcucuuuaucugca

SEQ ID NO: 4200624 - RNA, 96 nt, Human
ugcagguggggaugccagaaguucuacaaguggaguucugacgcauuagcuggaugcucagcaaaaagcuugugagagacaacuacaccccgggca

SEQ ID NO: 4200625 - RNA, 82 nt, Human
ugcagucacuccaggccgagucaccuugggucagcgauaccaugugguguccaagaaugagugauuuguccgagggacugca

SEQ ID NO: 4200626 - RNA, 63 nt, Human
ugcagucaucaguccuuuaauuagucucaaauaacagguuaaauaguggauuuggugauuaca

SEQ ID NO: 4200627 - RNA, 81 nt, Human
ugcagucucucagagugcucuagaaauugucagugguuuacauaaaguggccguggguguccagagcacccugaaacugua

SEQ ID NO: 4200628 - RNA, 101 nt, Human
ugcagucuucugccugcugccuguauugcccuucacugcaagcaggacugugcccuacugcugcaagagcuguggcaaaagcagcuggcuaggcagaugca

SEQ ID NO: 4200629 - RNA, 95 nt, Human
ugcagugaauauucugcucucgguaaccuuagaaaaucaaaauuagaaggaaacuuggaugucaucuggggaucagagagugcacagagauugca

SEQ ID NO: 4200630 - RNA, 62 nt, Human
ugcagugcagccgagaucaggugcuauuaggcuacaccugaguacagcugguugcuauagca

SEQ ID NO: 4200631 - RNA, 76 nt, Human
ugcaguggagggugagcucauguuuguguagacagacuugggucugggauguagaaggagcacacugcuccauuca

SEQ ID NO: 4200632 - RNA, 62 nt, Human
ugcaguguggauuuaguugugcuuuuuacuugcugggagagcacagccaccauuuacaagca

SEQ ID NO: 4200633 - RNA, 60 nt, Human
ugcaaguaaauagacugagucaucaccuaggauaagugacagcagucuuaacacauugca

SEQ ID NO: 4200634 - RNA, 61 nt, Human
ugcaaguagcauuuucaaaauguaucucugauggugauuuuuagaauaugcugcauaggca

SEQ ID NO: 4200635 - RNA, 56 nt, Human
ugcaagucccuuguucacuuggagcccauggcugcugcuuggaaauggggcugaca

SEQ ID NO: 4200636 - RNA, 86 nt, Human
ugcaauaauuuguuuucuguuuuaucauuuuuaaaaccuuuguuaucggggagaucaugguggacgggagacaggacuagauugca

SEQ ID NO: 4200637 - RNA, 81 nt, Human
ugcaauagagcagcuaauggaaaggaaaaucuuccaagugauaggaaaaugacauuucacauuggcuucuauuucuaagca

SEQ ID NO: 4200638 - RNA, 78 nt, Human
ugcaauggagauccagaacacaguggaagaauauauugaaauauguguaucuaagguguucuauaaauucucauuuca

SEQ ID NO: 4200639 - RNA, 78 nt, Human
ugcaauucuuaucacaaacaaucuacaaaggauugagauauguuuaaaaucauuuccuggaguuuguggugauaugca

SEQ ID NO: 4200640 - RNA, 56 nt, Human
ugcaauuuuccaacacauuuuuggaacuuccacaauugugcagaauuggaauugca

SEQ ID NO: 4200641 - RNA, 78 nt, Human
ugcaauuuugccuguuauuuguuauuuuuggaauauauguucuauuuuuacuuccuagaauaaguaacaggacaugua

SEQ ID NO: 4200642 - RNA, 64 nt, Human
ugcaauuuuuucccaguuagccaggaacacuuuagagauuccaguggcuuccuggaaaaaagca

SEQ ID NO: 4200643 - RNA, 65 nt, Human
ugcacaacaccaggaagcucauuucacauagaccaugauguagauguguugccuggaguugugua

SEQ ID NO: 4200644 - RNA, 76 nt, Human
ugcacaagaauaugaggaaacugugaaucagcaaauauugcaaagcaauagaaucacaguucucauuuuuuaugca

SEQ ID NO: 4200645 - RNA, 65 nt, Human
ugcacacacaugcagagggagagugagauggccucaugaucuagccacuucuggugugugugaca

SEQ ID NO: 4200646 - RNA, 73 nt, Human
ugcacacccgagcaagauuuuauaaguugugcuaauaauaaguacauguuuuucucugccuggguuuugugua

SEQ ID NO: 4200647 - RNA, 66 nt, Human
ugcacagauagugauagauagcccuaaaauacuuaaguuuugucagugucucucagugucagugca

SEQ ID NO: 4200648 - RNA, 82 nt, Human
ugcacagcagggagcucaggaagaaagaagggaguguguucauaacaauuucuuuccuucuugaaaaccuguuaucugugca

SEQ ID NO: 4200649 - RNA, 61 nt, Human
ugcacagcugccuccucucugcacggaaacggcaguuagaaaaacugagguugccugugca

SEQ ID NO: 4200650 - RNA, 79 nt, Human
ugcacaugggccucugagauaccuuaaagaagcucagcuacuuuuauggcuccuggcagguguuucaaggaaugugaca

SEQ ID NO: 4200651 - RNA, 83 nt, Human
ugcacccagccugauuuugauaauuauaucacuuguuuuugaaaauacacaaggaaauauguagauaucaagaggcauaugua

SEQ ID NO: 4200652 - RNA, 75 nt, Human
ugcacccagugggaugcuuagcauccgggccucgacccucuagauacuccuuuugccaaauacccacugguugca

SEQ ID NO: 4200653 - RNA, 84 nt, Human
ugcaccuuauguuuuacacaguacugcuuugggaugugcaaauacaguguuacucccacacagacuguaaguaucaugagggca

SEQ ID NO: 4200654 - RNA, 55 nt, Human
ugcaccuuguugcuuuuacgaagucugguaagaaugcggugaaguuaggguggca

SEQ ID NO: 4200655 - RNA, 63 nt, Human
ugcacguugaagucccagguugaucugcaugaagcacagcucugacauugauucucagcugca

SEQ ID NO: 4200656 - RNA, 116 nt, Human
ugcacuccuuugcauaguaacaagguugaauauucuccagauguuuuuaagagaauugcuuuuguuguugcuaaggcccuuggaaaaugcaguauuguuagcggcgugggugugua

SEQ ID NO: 4200657 - RNA, 58 nt, Human
ugcacuucaaaaaugucacugagaauucucaaauaagaaaugacauuuccagagugua

SEQ ID NO: 4200658 - RNA, 64 nt, Human
ugcacuugauuuccuaucuuuaugguagaugugccucuaccagaaagauaggaaaucaagugca

SEQ ID NO: 4200659 - RNA, 117 nt, Human
ugcagaaaaaugagaggcaagaggccauucuggaauguaaaguuuaugggccguauugcaaauacaaauagcuucuuuacuuucuagaaauaaauaggucugugucuuuccuuugca

SEQ ID NO: 4200660 - RNA, 57 nt, Human
ugcagaaaaugacaggaagaccaggaaucaagacacuguucucuugcaucuucugua

SEQ ID NO: 4200661 - RNA, 78 nt, Human
ugcagaaagcauugacucuucccccaaggccauucuucuguaucuauuuggcuggcggucaaggucaggcuuucuuca

SEQ ID NO: 4200662 - RNA, 56 nt, Human
ugcagaaagucacauucccuuuagcauuuguagguuuuguggugucucuuucugca

SEQ ID NO: 4200663 - RNA, 92 nt, Human
ugcagaagauguguucugauuuaaucuaggugucaagucuuugaugccauggauuaaguggguggcuuaaauuaaaaaaaaaaauuucugua

SEQ ID NO: 4200664 - RNA, 65 nt, Human
ugcagaaguggcuccaaaaacaaaugacauaaagcaggaacacuuuaguaauggagcuacuugca

SEQ ID NO: 4200665 - RNA, 57 nt, Human
ugcagaauuccuuuugacauguaauguagcauauucacaaguucuagggauuaggca

SEQ ID NO: 4200666 - RNA, 55 nt, Human
ugcagagaugggagugagagcccgucucuuugacauuccaacucacaucucuaca

SEQ ID NO: 4200667 - RNA, 64 nt, Human
ugcagagccagucuugugcuucuaaauuuuacacuauuuuacaggugccuaucuggucucugca

SEQ ID NO: 4200668 - RNA, 57 nt, Human
ugcagagcuguuaauggagcugaaucugauuuguguuuagccuguaagcacuuugca

SEQ ID NO: 4200669 - RNA, 64 nt, Human
ugcagagcuucauugcauaggcgucuuuuaguggagaaaacaguuacuauggugaugcuuugua

SEQ ID NO: 4200670 - RNA, 55 nt, Human
ugcagaggugcucaguggcagaaaugaaaucauuccagggcucauucccucugca

SEQ ID NO: 4200671 - RNA, 62 nt, Human
ugcagagucccaggacccagagacuuaccuauccaccccacucucaacaccagggcucugua

SEQ ID NO: 4200672 - RNA, 68 nt, Human
ugcagaguucagcccuacccauucccugggcagggccccuggcuggcugggugggcagagucucuuca

SEQ ID NO: 4200673 - RNA, 66 nt, Human
ugcagaucaaaguucguaacugauaaccaguuaauggaugagaagagacgaggcuuuguuuuagca

SEQ ID NO: 4200674 - RNA, 80 nt, Human
ugcagaugaauauugaaacugcaaccugggguaucgaagcuuccauuuguuguguauuaauauugcuauuuauuucugca

SEQ ID NO: 4200675 - RNA, 76 nt, Human
ugcagaugucaucaggcuaagacacuggcaaggaggaugggaagcuaggguggagagacuagaugacaaugaugua

SEQ ID NO: 4200676 - RNA, 68 nt, Human
ugcagauuaccuuggcugaagaaaacugucuuucccgagaucaggcccucuuccagguacagucugca

SEQ ID NO: 4200677 - RNA, 66 nt, Human
ugcagauucuugggccucccagaaguucugguucacuaggucugggacaggacuggggaacuugca

SEQ ID NO: 4200678 - RNA, 106 nt, Human
ugcagauuguauuuugcauaguguguaaugccaggggcugcuauucacauagguuauaagaaugccaccccauggaguuguacgguguguugccugcauaacugca

SEQ ID NO: 4200679 - RNA, 69 nt, Human
ugcagcaaauaaagacaauuauguccuguguaguauauaagauauauacaacauugcuuuguugcugca

SEQ ID NO: 4200680 - RNA, 130 nt, Human
ugcagcagagcaucaccuagcaacuuguuagaaaugcauaugcccuggccucaccucagacuuacugaaucagaaacucugaggauggggucaagcaguuguaauaagccuuccaggugauucugaugca

SEQ ID NO: 4200681 - RNA, 78 nt, Human
ugcagcagccucaucugguuucuuauuauuuccauuuuauauauauaaggaagcugaggcacagagagguuaaaugca

SEQ ID NO: 4200682 - RNA, 57 nt, Human
ugcagcagggcccaggcacagagcaccaucucuuccugucaacaaggccccacugua

SEQ ID NO: 4200683 - RNA, 63 nt, Human
ugcagcauauagcuuagugauggcagaagguaaauauuuaggcagcacaagcuguugauugca

SEQ ID NO: 4200684 - RNA, 56 nt, Human
ugcagcauccauauauuauuagacugagcuuuucuaauagggauaaacgugcugca

SEQ ID NO: 4200685 - RNA, 107 nt, Human
ugcagcaugcaggagaggcucuggugcagcaugcaggagaggcucuggugcagcaugcaggagaggcucuggugcagcaugcaggagaggcucuggugcagcaugca

SEQ ID NO: 4200686 - RNA, 76 nt, Human
ugcagcccccaggagaaaucuuaaacuagagaucuugccaaaccuccuggagauuucucccugggggaauuuugca

SEQ ID NO: 4200687 - RNA, 55 nt, Human
ugcagccuguccaggcccagaauguccuuaacucggcaucuccaggacgagcuca

SEQ ID NO: 4200688 - RNA, 62 nt, Human
ugcagcgcggccguguugucacugugcagcagugcgugcaggaaggcgcggcugugccugua

SEQ ID NO: 4200689 - RNA, 63 nt, Human
ugcagcuguguaaugagcccacaucuguuaccaccacauguugcucagcgcuacgcagaugua

SEQ ID NO: 4200690 - RNA, 71 nt, Human
ugcagcuuuagauuuucuuuuagcccaagcugggggcucauguuugguguugaacaaaacuaaauguugua

SEQ ID NO: 4200691 - RNA, 62 nt, Human
ugcagcuuucuaagcuuuauugcacgggauuuggaaacuugagccuagagauggaaggcgca

SEQ ID NO: 4200692 - RNA, 55 nt, Human
ugcaggaacuugguuuuacucagaacaaaagcgauguggaauaaagucuucugca

SEQ ID NO: 4200693 - RNA, 95 nt, Human
ugagcucuuccugcagauggcacugguguuacuuggauaaagaacauuuuuguguucagcagcuuuuaguacauugugcacacuggaaaggcuca

SEQ ID NO: 4200694 - RNA, 97 nt, Human
ugagcugcuaagagguggcccagccuauuuuaugguacuguaaauauugcgaauuuagagaaccaaugaauagucuugcuaccuaugcauuagcuua

SEQ ID NO: 4200695 - RNA, 63 nt, Human
ugagcugggaagagcagccagagggugucuccuuauuucugguccacuauucuuuuuacuuca

SEQ ID NO: 4200696 - RNA, 83 nt, Human
ugagcugggcagggccagagagggcuggcuggggucucugccacuccuaagcccccucacccuggcuuccccugcagugcuca

SEQ ID NO: 4200697 - RNA, 63 nt, Human
ugagcuguagcagaugcuguugaugccuuagucacuugggcagcaagugucagcugcagcuca

SEQ ID NO: 4200698 - RNA, 56 nt, Human
ugagcugugugacauugagccauccuuaugccaugccucaguuuccucauggcuca

SEQ ID NO: 4200699 - RNA, 85 nt, Human
ugagcuuccgguuuauaaggcccaauauuucuuuccuuucucaaauauaaagaaauaugagucuuauagaagcaaaagaaguuua

SEQ ID NO: 4200700 - RNA, 83 nt, Human
ugagcuuggggaagugggucagggacagaucuugcaagguugggauguaaucugauuucugauuuauuucauaagaaggucca

SEQ ID NO: 4200701 - RNA, 55 nt, Human
ugagcuuucauguaugaaaagacugucaaaaacagaucauucaugcuggggcuca

SEQ ID NO: 4200702 - RNA, 73 nt, Human
ugagcuuuguuguuaguauauuugcauuggagcccauggaaugaaauauauauuagcaauccacagagacuua

SEQ ID NO: 4200703 - RNA, 71 nt, Human
ugaggaaaggcaugugggcugguuguacaguagugaugcuggauuugcaaugaggcaacaguaauuucuca

SEQ ID NO: 4200704 - RNA, 58 nt, Human
ugaggaagaacaagaauuuagagaugggucugauuccagaaucuaguguucuugcuca

SEQ ID NO: 4200705 - RNA, 59 nt, Human
ugaggacauuaggaagugaagggcaggaagaagcaaaucuuagacuguuggugucuuca

SEQ ID NO: 4200706 - RNA, 84 nt, Human
ugaggaccccugcacuagagaagggcacagucucauaaagcagauccugagacuaaagacucauucugcugcugggucacugca

SEQ ID NO: 4200707 - RNA, 95 nt, Human
ugaggacuuggcuuugcagaggaccauuguccuggagacaguccugacccugguuuccaggagguugagugaguuccuucaugguaaaguuuucg

SEQ ID NO: 4200708 - RNA, 121 nt, Human
ugaggagaaaaugagaguacagaaugguauaugccagaagccaaaaaauauucucuguaaaggaccaaacaguaaauauuucaggcuucuugggccagauggccucuguuguaacuccuca

SEQ ID NO: 4200709 - RNA, 76 nt, Human
ucggagccggcccugcccucucggcacucgcgguccggaccaggaaggcggcccgagcaggacgggugggcugcgg

SEQ ID NO: 4200710 - RNA, 77 nt, Human
ucggauaaucucagagauaucuguguccuacacagcaggguucuguaaggggcacauggauaccucugagaagcuga

SEQ ID NO: 4200711 - RNA, 62 nt, Human
ucggauccuuggauaacgcaugaauguuucaggcaucagaugguacuaauuuaaggaucugg

SEQ ID NO: 4200712 - RNA, 66 nt, Human
ucggcauacguggaaguaucugugaccucauuucuaugaacucaaacugcuuaccaucugugcugg

SEQ ID NO: 4200713 - RNA, 84 nt, Human
ucggcccccugcugacgcagugcccgccgccguuccuggaugacuucaguggugaaguggugcaccaugucacaggccugccgg

SEQ ID NO: 4200714 - RNA, 74 nt, Human
ucggcuccugugaggacacagccgccgggcccaggaggucacgugcaagcugugccuucucaggauagagccga

SEQ ID NO: 4200715 - RNA, 60 nt, Human
ucgggcuccaggcagcugggaguagccggagccggcuucccuccugguccaggagccuga

SEQ ID NO: 4200716 - RNA, 59 nt, Human
ucggggcucuucugcucgcuuuuuuuccucuucagaaauuaaagcagaggagcaucuga

SEQ ID NO: 4200717 - RNA, 77 nt, Human
ucgggucuacuccuccuaaaugauucuuccuguauguuuuacgugggggucgaggggauaggagaggguggcccuga

SEQ ID NO: 4200718 - RNA, 108 nt, Human
ucggugcuucccagagaccccucugagcuggccuguggggcacgggaagcccccuggaugggaggcggggccacaggucggcuagagggucuccaccaggcccacuga

SEQ ID NO: 4200719 - RNA, 73 nt, Human
ucgguggacgccggggccuaccgcugcguggcccgcaaugccgcgggccacacggagaggcuggucucccuga

SEQ ID NO: 4200720 - RNA, 74 nt, Human
ucgguugccaggcaacugcccagccaucuaugacagaggaauucccucagaggagggcgccaccuggcggcuga

SEQ ID NO: 4200721 - RNA, 83 nt, Human
ucgguuuccacaccuguacagggccgggcuggcucacaaacuuccugggccucgguuuccacaucuguacagggccgggcuga

SEQ ID NO: 4200722 - RNA, 109 nt, Human
ucgucaacauuacucgacagauguggcaccgaucuuuagccagagaacucucuggaaccaucaaagagauccuggggacugcccagucuguaggccguaauguugaugg

SEQ ID NO: 4200723 - RNA, 91 nt, Human
ucgucuuaugauguugcauauggaccaacuucuuaauugauaaauauugauaaaguuacuguuucauugagacuauagacaucagaaucga

SEQ ID NO: 4200724 - RNA, 62 nt, Human
ucgugaugcaguguccucccaugcacagugauucucaguucauggacccaacauugcuauga

SEQ ID NO: 4200725 - RNA, 69 nt, Human
ucgugcacagucaacacuuauucaccaucaggcaauccaugguguagggaaacuugacuaauguaauga

SEQ ID NO: 4200726 - RNA, 75 nt, Human
ucgugugacagaagcaaggucugucaguauauucaaaauauauguuauauuuuaaucuuguuuucuguuuuauga

SEQ ID NO: 4200727 - RNA, 78 nt, Human
ucgugugggaaaugggaggucugagccgugggggguguucuccagcccauggcucuuaccuuguuauaaucucacuga

SEQ ID NO: 4200728 - RNA, 65 nt, Human
ucguguuugcaaauuauguuaaaaguaaaggaauacuuuuuucuuaaaugauuuguaguccaugg

SEQ ID NO: 4200729 - RNA, 78 nt, Human
ucguugguacauguuaaggaagaguaauaccaugauguaauccuacucuuccuuaacauguguguuuuaagccuuuga

SEQ ID NO: 4200730 - RNA, 66 nt, Human
ucguuguucuucuucuuguucaaggcuacagcuuuaacuuugucacagcaagaguaaggacagcga

SEQ ID NO: 4200731 - RNA, 62 nt, Human
ucguuuagcugggcacauucagaauuuucucuuuuauugagcaacugugcucugcuaaauga

SEQ ID NO: 4200732 - RNA, 81 nt, Human
ucguuuaucagaauguuauuguguuuguucagggcaaaguugcuuuuagaugggcaggauaguguugaauuugguagagga

SEQ ID NO: 4200733 - RNA, 56 nt, Human
ucguuuggcugaagcuacaucagcaggugcaucugcuggcugaaacagccaaagga

SEQ ID NO: 4200734 - RNA, 79 nt, Human
ucuaaaaaucucuacuuugggucagauaagcggguaaauuagcuccacuuuauguccuugaagaguugugauuuuagga

SEQ ID NO: 4200735 - RNA, 62 nt, Human
ucuaaaagccgugagucucuccccugggccucuagaagcagcaggacucaugguuucucaga

SEQ ID NO: 4200736 - RNA, 96 nt, Human
ucuaaaauguucuauaaaaggucagacagggugucuuucucugauuccaucaggccucugggaagaaccucugcuaccaauuaugugcuacuugga

SEQ ID NO: 4200737 - RNA, 98 nt, Human
ucuaaaauuuaagaagcacuguauuccuacuagaaucuagaugauucauagaaucuagauuauucuaaugggaguucaccgcuucugaaucaacuaga

SEQ ID NO: 4200738 - RNA, 68 nt, Human
ucuaaacacuaagucuugaugcucauuuuuguguucacauuggaaaaauaucuggauuuagguuuuga

SEQ ID NO: 4200739 - RNA, 79 nt, Human
ucuaaacagcaaauuugaaugagaauuauugucauuuugucacugaugagcagaacuaauuuuuuuucacuguuaugga

SEQ ID NO: 4200740 - RNA, 128 nt, Human
ucuaaauaaaggauuauauuagcuaaaaacgauugaacuugagauaugaguagguaccuuucuaguaucugguuuuguuacagguucuuaugguugauuuucugccuguaauguaguauuuuaauaga

SEQ ID NO: 4200741 - RNA, 72 nt, Human
ucuaaaucccaacaugauaucaggagcuucuacaugcgcuuuguaagaauggugucuggugggaguuuuaga

SEQ ID NO: 4200742 - RNA, 85 nt, Human
ucuaaauuuaaauacuaaaugauuaagcaggaauuuacgucaaaaagcuugaaauuccuguuauuuauuuggguaaacauuugga

SEQ ID NO: 4200743 - RNA, 65 nt, Human
ucuaacacuguuauuaaacugcucucuuuuguuagaaaaggugcuguuugucagcaguuuguaga

SEQ ID NO: 4200744 - RNA, 91 nt, Human
ucuaaccaaguugcugggaaaauucagagagcuugcauuuaauucccaaggcaagcuuuaugcuacgauuucuaguuuuaacaagguuaga

SEQ ID NO: 4200745 - RNA, 63 nt, Human
ucuaaccuuuuuaucuuaccuccagcuagugaaacuccaguuagauagaugagaaguguuaga

SEQ ID NO: 4200746 - RNA, 69 nt, Human
ucuaacuauacaaagaaaacauuuagauuucaauauuuuucucugugugugugucuggguguguguaga

SEQ ID NO: 4200747 - RNA, 58 nt, Human
ucuaagcugaccacauggccaagccaugugucaugauguggaguuguggcaguuugga

SEQ ID NO: 4200748 - RNA, 129 nt, Human
ucuaaggacuccuccugcucaaccacauccacuggucgggguccacccaggccaagcacagagcugcggaggggcugagguggccucugccggggaauggaaaacggcucucuuggaggaacugaagga

SEQ ID NO: 4200749 - RNA, 76 nt, Human
ucuaaggccuugaggauagaacaucccucauccuagcaggaaauaaugaaaccuucuaaccuuaaagcccuuugga

SEQ ID NO: 4200750 - RNA, 63 nt, Human
ucuaagggaaaucuuucaacacuucauuguuaaggaugauguuugcugaagguuuuugguaga

SEQ ID NO: 4200751 - RNA, 113 nt, Human
ugcaggacacuucgggaugugggucacauuuuguccuggaaucaguacuuaccagcuuagucugaggccuugggacagaagugcugcucauaaaaguaaauuguguuucugca

SEQ ID NO: 4200752 - RNA, 63 nt, Human
ugcaggagcccaggaauacuaugcgacacuugauacuagcccugaguauuggcagguccugua

SEQ ID NO: 4200753 - RNA, 127 nt, Human
ugcaggcaaagcuccaauaccucagcggggaaugcuuggagccaaaaugacaugagagugaaguuucucuuggcuccucacagcaucagugaacucucagcugaugggguaagggaggugguuugca

SEQ ID NO: 4200754 - RNA, 71 nt, Human
ugcaggcaauuuccaucauccuaacgagaaagcaguccaagaguguuuucugccgguggugggcuccugca

SEQ ID NO: 4200755 - RNA, 57 nt, Human
ugcaggcagggccagcgugaggucaggauuaaccagagaagcugugcucuucuugca

SEQ ID NO: 4200756 - RNA, 57 nt, Human
ugcaggcuagagugaagacaaauuacuugagaaaagugguuugauucaguuuaugca

SEQ ID NO: 4200757 - RNA, 66 nt, Human
ugcaggcucugagugaagggggccuccucauuggagugugcaggggccuccucauuggagugugca

SEQ ID NO: 4200758 - RNA, 76 nt, Human
ugcagggcuggaggagaaugggugugagucuagggucagcucaggcagcauuaaacuucagcagcuuauuccugca

SEQ ID NO: 4200759 - RNA, 76 nt, Human
ugcagggugccaagcaaugauuggaacaugaaagcuauucaaugcauaucagugauuguuugcucuucauucugca

SEQ ID NO: 4200760 - RNA, 62 nt, Human
ugcagggugguuugaagggucugggaacuggaggugaggccagaaccuuggaugccauugca

SEQ ID NO: 4200761 - RNA, 63 nt, Human
ugcaggucacguuuuuugguuugaguccacaagacucugacaaugcugaaggaggugccugca

SEQ ID NO: 4200762 - RNA, 57 nt, Human
ugcaggugauucugaugcaguuuccaguuugagaaccacugcuguagaccaucugca

SEQ ID NO: 4200763 - RNA, 61 nt, Human
ugcaggugucugggggcaacagagucuaggauguggccacaagugucccauggacauggca

SEQ ID NO: 4200764 - RNA, 93 nt, Human
ugcaguaaauguuuuauggcuaucuugcagccaagggcagcugacaugaagaagcaagggacuugcaaauagccugaugaaagaauuucugca

SEQ ID NO: 4200765 - RNA, 59 nt, Human
ugcagucaggagcugcugcauuguaagucaucuuacaguacagucuagacucuggagca

SEQ ID NO: 4200766 - RNA, 61 nt, Human
ugcagucuuuccucgaguuuguuuggagaaagcagcaaacguaugaaaaggaaaaacugua

SEQ ID NO: 4200767 - RNA, 64 nt, Human
ugcagugagguggauggauggccuggccuguuggcaagggcagaaaucgauuacaccucuugua

SEQ ID NO: 4200768 - RNA, 62 nt, Human
ugcagugaugcuguacagggcagccaggccccuccuaggccagcugcucuccacggucugca

SEQ ID NO: 4200769 - RNA, 62 nt, Human
ugcagugguugagagcccagacucaaaacguagacauccuggguuugaaucuaccacuugca

SEQ ID NO: 4200770 - RNA, 62 nt, Human
ugcaguguggauuuaguugugcuuuuuucuugcugggagagcacggccaccauuuacaagca

SEQ ID NO: 4200771 - RNA, 68 nt, Human
ugcaguguggccaugucagcuauguggcagagaccuagauucacuaguagugugacaggcuaacugua

SEQ ID NO: 4200772 - RNA, 55 nt, Human
ugcaguguuccaggcggcagugaacugcauucaccuccuguuugggagcauggca

SEQ ID NO: 4200773 - RNA, 69 nt, Human
ugcaguuacacagccagggagggacagaagcagaaucugaaccucugcagccuggcugugaagccugca

SEQ ID NO: 4200774 - RNA, 68 nt, Human
ugcaguucucucaagauucagaaaguauggauaccuuugccaugccuggcagcuugaaagaaauagca

SEQ ID NO: 4200775 - RNA, 93 nt, Human
ugcauaaaauaacuuggauauucaagugaggauggcuaauccaaacaaugcuuagcauucucauuugcauaaagagcuuugaguucauaugca

SEQ ID NO: 4200776 - RNA, 65 nt, Human
ugcauacugauugggaguuuuguucuaugcauugcagggagcugaguuaccuccagaucauagua

SEQ ID NO: 4200777 - RNA, 58 nt, Human
ugcauagguucucucagaaaaguuuuuuuucccacuuaguuugaugagaauuuaagca

SEQ ID NO: 4200778 - RNA, 120 nt, Human
ugcauagucagcugugaaauuauuuuucuuucuugaaaucuagcuuagguccacagcuauauucuguuaccuaaauucuggcugauuaggcaggaaggaaaugauuucauucugaaggca

SEQ ID NO: 4200779 - RNA, 62 nt, Human
ugcauaucuucaaugcuguugcuauguuguauucuucuauugcaauacacuguagaugugca

SEQ ID NO: 4200780 - RNA, 94 nt, Human
ugcauauguauaugcauauguacuugcauauguauuugcauauguacuugcauauguauaugcauauguacuugcauauguauaugcauaugua

SEQ ID NO: 4200781 - RNA, 70 nt, Human
ugcaucaaaagaauacccugggucauaaauagcagucauuaauugcagcugcuuuuacaccuaguaugca

SEQ ID NO: 4200782 - RNA, 86 nt, Human
ugcaucaguguuuuugguuccuaagaccaaaggaugacucuaauccuucaaaaguugagagagccauguuguuaggcauuggugca

SEQ ID NO: 4200783 - RNA, 76 nt, Human
ugcuccuggcuagauguguggccaugaagagguuacuuacuccuuugaagcccaaguuccucaucuugcuuuugca

SEQ ID NO: 4200784 - RNA, 100 nt, Human
ugcucggucacccaggcuggagugcaguggcacaaucuuggcucacagcaaccuccgcugccaggguucaagcuauucuccagccucagccucccgagca

SEQ ID NO: 4200785 - RNA, 86 nt, Human
ugcucuacucggcgccucuccauggggcuacggcaaggcuugcugccuacgagcagaauggagggugccgaguucuccuagagaca

SEQ ID NO: 4200786 - RNA, 75 nt, Human
ugcucuggacuugagauguguuguuaaccuggcugguaagacagguucuuaaguaacagcacaccuucccaggua

SEQ ID NO: 4200787 - RNA, 97 nt, Human
ugcucuggcaaaaccuuuucaguugaucauuaucaaacuggucauguuucaaagauaaugaucaggaugauuagugcuccagaaacugugccaugcg

SEQ ID NO: 4200788 - RNA, 65 nt, Human
ugcucuguuaugucucuguaucacaaagggucacagcuaagguaaaacaggggcuagcggaagca

SEQ ID NO: 4200789 - RNA, 69 nt, Human
ugcucuguugguuauuugggaugcaaggaacagcuguauacagucugucagucauucuaacaacaggca

SEQ ID NO: 4200790 - RNA, 101 nt, Human
ugcucuuacugcacuucaugcaaauuugccagaucaauucugaaaucauuuuagaucagcaguauaaaugagcaagugcaugaauuguagaucuuugagca

SEQ ID NO: 4200791 - RNA, 62 nt, Human
ugcugaaauauuuauggguaaggggucacgaugucugcaacuuacucacaaaugguuuagca

SEQ ID NO: 4200792 - RNA, 83 nt, Human
ugcugaaauguccuggcacuuccacuuugcuuuacuguaagccaucuuccaguccaggccuggaggagccaucuaucucacca

SEQ ID NO: 4200793 - RNA, 73 nt, Human
ugcugaacuacuaccaguaguaguaguaguaguaguaguaguaguaguaguaguagugguaguaguaguagua

SEQ ID NO: 4200794 - RNA, 55 nt, Human
ugcugaacuauuccauggggaaguuucugcaaucuucauuccaaauaguucagca

SEQ ID NO: 4200795 - RNA, 73 nt, Human
ugcugaagauuucaccaguggaaaagaugucucaguaaaggagaugauuuuugccagugugaugauucaggca

SEQ ID NO: 4200796 - RNA, 72 nt, Human
ugcugaaucccucucuuccuggagucagagucaucagacauucuggagccuuggaugggaaagaauuuagca

SEQ ID NO: 4200797 - RNA, 116 nt, Human
ugcugacaaguuuccuuaauugauauuaaaguucgucauucaauaaagaaaccauucuaaggcaauucaguguggaaugugaacugcagugaacacagacaagaaauuaaaaagca

SEQ ID NO: 4200798 - RNA, 57 nt, Human
ugcugacacuauucuaaaaagcagauaauuuugguucugcuugaauaaugaauagca

SEQ ID NO: 4200799 - RNA, 76 nt, Human
ugcugacaggccaggggcugagguggccuuuccugacagcccaggauuucccuuaagccacugaccuccaaaagca

SEQ ID NO: 4200800 - RNA, 66 nt, Human
ugcugaccugcucucagcagagaggaaauggccucccucccaucuuggcugcagagccggcaagca

SEQ ID NO: 4200801 - RNA, 59 nt, Human
ugcugagagagguacucagggaagacaagccaacuagccugggugaaaucucuccugca

SEQ ID NO: 4200802 - RNA, 63 nt, Human
ugcugagaggaaggugcacuggggcagggacuacauaaaauuccagcgcccccauucccagca

SEQ ID NO: 4200803 - RNA, 60 nt, Human
ugcugagaugcugggaugucgacaggcgugagauucuguccaucacuauuaucuacaaca

SEQ ID NO: 4200804 - RNA, 55 nt, Human
ugcugagcaacguggagaguuuugaagagauugaaaaugguucguuugcucugca

SEQ ID NO: 4200805 - RNA, 56 nt, Human
ugcugaggcauuuggacagagugagaaaucaugucauguuuucaguguuucuagca

SEQ ID NO: 4200806 - RNA, 56 nt, Human
ugcugagggagcaucaaagaaaggagaacuugccccuuuauuuggcuguuuuagca

SEQ ID NO: 4200807 - RNA, 88 nt, Human
ugcugagggcccuuacgcaggcccuuccccauucuaggcucaggcuugccacugauaaugaagggcuuggcugggaggccacucccca

SEQ ID NO: 4200808 - RNA, 102 nt, Human
ugcugaguccuuuacaagaugcaucauuagcacaugacggaaagcaauuaacuugcuucuuacucauaugcugaucaaguugcaacuggaaaggaguuugca

SEQ ID NO: 4200809 - RNA, 65 nt, Human
ugcugagugcuugcuauuuguuagguuuuggucuagguccuagggauacagcagaguacaaagua

SEQ ID NO: 4200810 - RNA, 55 nt, Human
ugcugaguggcauggagugcuuagauaacaaugagcuccaugacuugaauuagua

SEQ ID NO: 4200811 - RNA, 59 nt, Human
ugcugaguggcggccucacuuuuaugcauuauaccagauaugugaggguucacucagca

SEQ ID NO: 4200812 - RNA, 130 nt, Human
ugcugaguucuaggauugacaguucgagcuucaguauaaaaacugaguaccucugcauucauucgaugaugaauaaugcagggcggcuuguuuauuugcuugcucugaaaucuuauccuguuuuucagca

SEQ ID NO: 4200813 - RNA, 114 nt, Human
ugcugauggauuucaagcagacagcaagacaaggaacaaacuguggugauuagcauugucagagcaguuuugaagugcuuguuuuguacuuuucuuuaucgguccuaaucagca

SEQ ID NO: 4200814 - RNA, 55 nt, Human
ugcugauguccuaguucuggucucuuacuucauagaucuagacuugggcccagua

SEQ ID NO: 4200815 - RNA, 73 nt, Human
ugcugcaauuaagauuuagagaaaaguaugugcuuacgucuauuacguauuacaaauaaauguuacuguagca

SEQ ID NO: 4200816 - RNA, 61 nt, Human
ugcugcacaauuggaaaguaucacaugagauacuucuaagacaauauucagcugagcagua

SEQ ID NO: 4200817 - RNA, 60 nt, Human
ugcugcagaaauucugugaggauggaugccuccuaauccuugccuucagcucugccagua

SEQ ID NO: 4200818 - RNA, 64 nt, Human
ugcugcagcugcugguuuaagggauggguuauucaagggcccaucucccaccagcugcuuugca

SEQ ID NO: 4200819 - RNA, 59 nt, Human
ugcugcagugggauuagccugaagaauccuucuauguccccguuauucucucugcagua

SEQ ID NO: 4200820 - RNA, 56 nt, Human
ugcugcauagcagcuccugaaauuaguagacacuuguuuggaagcuguguguagua

SEQ ID NO: 4200821 - RNA, 65 nt, Human
ugcugcaucguugagcauuugcuacacagagaauaaccuuggagcaauguucaaaggugauggca

SEQ ID NO: 4200822 - RNA, 86 nt, Human
ugcugcucuucaucugacuggguuaaguucauguagagaagggaucugaaacauuucuacauagcuccuagugaugcaugcaugca

SEQ ID NO: 4200823 - RNA, 92 nt, Human
ugcuggagaucuuucaugcuuuuccuaaaaugaugccucugaggugaggugaccuacauguggaaaauaccgcacugaaaguuuucuuuuca

SEQ ID NO: 4200824 - RNA, 56 nt, Human
ugcuggcaaaggcgcucacaugccugcagaccgcaggugaagggccuuugguggca

SEQ ID NO: 4200825 - RNA, 84 nt, Human
ugcuggcauugguucaguagcucuaaacugugagaacuuacuugcugcuuuguuuucacaagacagcuacuguugcuccagaca

SEQ ID NO: 4200826 - RNA, 56 nt, Human
ugcuggccauagaagccaaagagggaugcaucugucauuucucuucuggguuagca

SEQ ID NO: 4200827 - RNA, 61 nt, Human
ugcuggccugagggcuccuagcaggcugccucugcagccuggccacucagggccugaggca

SEQ ID NO: 4200828 - RNA, 69 nt, Human
ugcuggccugggugcugcugacaucuggccauacuccacccagauagcucugcuccccagagcccugca

SEQ ID NO: 4200829 - RNA, 57 nt, Human
ugcuggcucaagcugauaagagaaaauauguaagaguguuggcuucuugagcuaaca

SEQ ID NO: 4200830 - RNA, 59 nt, Human
ugcuggcugugauuuugccaacagagauaaaauucgugcuggcuguguuauugccaaca

SEQ ID NO: 4200831 - RNA, 63 nt, Human
ugcuggcuuuuccuaaacugggaaguauagauccacaaacuacuucaucagcaaagcacagca

SEQ ID NO: 4200832 - RNA, 63 nt, Human
ugcugggcaaauugugccagcuauggguaucaauuuuauagcuuaucccacagugcccagaca

SEQ ID NO: 4200833 - RNA, 65 nt, Human
ugcuggggccugagguggagcugcagacucugacugaggugcaggaggcuuuauucaggauagca

SEQ ID NO: 4200834 - RNA, 64 nt, Human
ugcugggucagugagagcagggaguaugccagacaagagagcuuccugcggccacaagccugca

SEQ ID NO: 4200835 - RNA, 95 nt, Human
ugcuggguucucaggguuagguagggacucugccauuucuuacugucaaaaucucuccuguggagaugguguuccacugccagucuagcucagca

SEQ ID NO: 4200836 - RNA, 80 nt, Human
ugcugguggugcuggagcucuguguguuccugagccgcugucugcucgguguuuucaggcggagcucugggccccaugua

SEQ ID NO: 4200837 - RNA, 55 nt, Human
ugcugguuagugcugccuggguaaagggagcugggcccaggcagagcuagcggca

SEQ ID NO: 4200838 - RNA, 111 nt, Human
ugcugguucauacccuucccuccucagggcugguuacauggauggcucccaaccuaaacccccccaugccagcugcuaggucacagggaucucuggaggguguaacgggca

SEQ ID NO: 4200839 - RNA, 55 nt, Human
ucugcaggguuuuaacaauggacaaggaguuuuuucugcagucuggcccuauaga

SEQ ID NO: 4200840 - RNA, 80 nt, Human
ucugcauaauaggugcuugaggaacggaggcuguguguuucugcacgccagcccagugcauuuguguacucacauguaga

SEQ ID NO: 4200841 - RNA, 57 nt, Human
ucugcauguuggcauccagguguauuauuauuccugugugguagccagcggugcaga

SEQ ID NO: 4200842 - RNA, 57 nt, Human
ucugccacaggcagcagaaaacaaaugguugggauucccaucuuugccaguggcagg

SEQ ID NO: 4200843 - RNA, 58 nt, Human
ucugccacuuagccagaaguccucagacaauuuauuagagugcucaguuaaguggaga

SEQ ID NO: 4200844 - RNA, 78 nt, Human
ucugccaggcuguggcuccaggaaggcccucugccaggcuguggcugagaguggccuggccuggggcauggcugcaga

SEQ ID NO: 4200845 - RNA, 121 nt, Human
ucugccaucuagcugcccugcguauugccugccaguggguaguuggagcuggguaucucuccaaagcugggcucuuggcugcccuuugugaaggcaauuuuaagggacagcaggaugugga

SEQ ID NO: 4200846 - RNA, 75 nt, Human
ucugcccaugggugggggcuggaaaucuugccaggauuuguggccagaaaauggucccccauggccagggacaga

SEQ ID NO: 4200847 - RNA, 60 nt, Human
ucugccucucggcugccgaguucccacaggcucugggagacugaggcugccagggucaga

SEQ ID NO: 4200848 - RNA, 78 nt, Human
ucugccucuuuucuguaugugagagcagagaaucgucacugacagccucucccaggucauacacagagaggaaguaga

SEQ ID NO: 4200849 - RNA, 77 nt, Human
ucugccuggagaguucuucucugcccucugagccuggugagcuggagaacacccucagagaggagccccauggcaga

SEQ ID NO: 4200850 - RNA, 103 nt, Human
ucugccuggcaugaacacuucuauuucagcacaucugugauugccauaucaccagcauuugcagaaauggaggauuaauuuuauugugcauuagcucagcaga

SEQ ID NO: 4200851 - RNA, 75 nt, Human
ucugccuuaccucuggggcagucugacacuauggaauacucuggucaggcugaacugccacaaagguugggugga

SEQ ID NO: 4200852 - RNA, 61 nt, Human
ucugccuuggaaauuucaacagcgugcauucuaggcagccaacaugaaagaaucagggaga

SEQ ID NO: 4200853 - RNA, 59 nt, Human
ucugccuuggauuuguuggcccaggucccaugggugcugugggccauggccaagugaga

SEQ ID NO: 4200854 - RNA, 70 nt, Human
ucugccuuuucacugccacuaagagagggguagcauucaaugagcagauggcaguggcucagagugcaga

SEQ ID NO: 4200855 - RNA, 77 nt, Human
ucugcgcuuuagcacccuagaguugccugaggacucauuggguucguagggcuuaguggggcuagcuagaaugcgga

SEQ ID NO: 4200856 - RNA, 114 nt, Human
ucugcggcuuggcugugcuuauuuggccaaacagguccccuccccuaccaggcuuccugcuggggccuugggaacaggggggacuucuggaccaaaucagacaauuguuguaga

SEQ ID NO: 4200857 - RNA, 61 nt, Human
ucugcgguccccuucucgcccuccacacacuucucucggggcugaguugggggaucgcgga

SEQ ID NO: 4200858 - RNA, 65 nt, Human
ucugcuaauuucugcuauuauucugcuaauuuuugcagaaacuagauuugcagaaacuagacagg

SEQ ID NO: 4200859 - RNA, 78 nt, Human
ucugguuguggaguuucaggauuguguuuuuccugacaguugggucaggaaauuaaacacuugaaagcacagagcaga

SEQ ID NO: 4200860 - RNA, 84 nt, Human
ucugguuuaaccuaauaccuagagaugauacaaaucucauuuuuguuuguuauauuuugguguuguagguggguugaaaauaga

SEQ ID NO: 4200861 - RNA, 119 nt, Human
ucugguuugcagauggcugucuucuagugugcccucacaaaguggaaagagagaggaaguaagcccucugugucuuucccuguaagggcacuaaugagggcuccaccuucaugaccuga

SEQ ID NO: 4200862 - RNA, 63 nt, Human
ucugguuuggacuuccuugagaaagugggaaacagucacacauugggaugaagucuaaaaaga

SEQ ID NO: 4200863 - RNA, 111 nt, Human
ucuguaacuauguguuaaaaugucugaguucucugauuuuaaaugaggcaugacuguucaaaggcagguaaugucuucuguggagacagguauuuagacgaacacuucaga

SEQ ID NO: 4200864 - RNA, 76 nt, Human
ucuguagaacaguuaauagauuugauuuuaaaggcauuguuacagccuuuuauaaaguuguauugaaaccugcaga

SEQ ID NO: 4200865 - RNA, 83 nt, Human
ucuguagcuguauuucugaauguucaugucauauguuaccagcuuugauacaguucaugaaauuugaaguacagcaauacaga

SEQ ID NO: 4200866 - RNA, 82 nt, Human
ucuguaggagcaaaauggcugacuuuucaugggagugaggaagggcuucccagaagagaugccacuugagcugugccuuaga

SEQ ID NO: 4200867 - RNA, 70 nt, Human
ucuguagguggggggaaaugcuuuuuaccauaaccacggaagauacauuaugucucucugaaaccacgga

SEQ ID NO: 4200868 - RNA, 57 nt, Human
ucuguauauucucugguuguguauaauaugagcuugcgcagcugagaaauauacaga

SEQ ID NO: 4200869 - RNA, 66 nt, Human
ucuguauuuuccccaggagcaaugauucaguauuugcuaagucagcauuuguggugacuuuauaga

SEQ ID NO: 4200870 - RNA, 105 nt, Human
ucugucaaauauuagacaaagauacacuugaccuggagugaaguaucacgaauuuuuaaacauuuaacuccuaguguguauuagugugaaacuaaguugagcaga

SEQ ID NO: 4200871 - RNA, 55 nt, Human
ucugucaaaugagcaaguaacucuuagaaccugaaauacaagcuuuuuuggcagg

SEQ ID NO: 4200872 - RNA, 94 nt, Human
ucugucaccucuagccauuuguuuacacugaaguguucuucugacauuaaugcuaucaguguuuguggcaaauguuagucuuuggugguauaga

SEQ ID NO: 4200873 - RNA, 64 nt, Human
ucugucaguucucugcauugucucguccaccuuuuaugggagaucgguaaagagcaugcacaga

SEQ ID NO: 4200874 - RNA, 69 nt, Human
ucugucauaagugcugaaguauucaggaaaugggugggcaaaggaauagucuucagcacuuugaucaga

SEQ ID NO: 4200875 - RNA, 84 nt, Human
ucugucaugucacugcaaauugcaauguuuuaauucuucuugauuuaguggcaggaguuaaaauauguaauguacauagaagga

SEQ ID NO: 4200876 - RNA, 59 nt, Human
ucuguccauuuggaguuggaagauuccauugaaaucuucauggcugauaauuggauagg

SEQ ID NO: 4200877 - RNA, 89 nt, Human
ucuguccuacccaccuuggagcucuuuagagucucccuucuggguucugaaugccagugggagacagugagagcuggguagagaaaagg

SEQ ID NO: 4200878 - RNA, 89 nt, Human
ucuguccugggugcuggguguuggguacugaccgucuccugcaaaggcgauugaagggugaccagccauccuaguguacccgggacuga

SEQ ID NO: 4200879 - RNA, 57 nt, Human
ucuguccugugucuaggggucuucucaucaggagaagaaggccagacacuggaaggg

SEQ ID NO: 4200880 - RNA, 89 nt, Human
ucuguccuuccuuuugcuugccucaugcccaauuuuccaagccaaggaaagguuugggaaggcguggaagcagaaggucugggcacaga

SEQ ID NO: 4200881 - RNA, 60 nt, Human
ucugucuccucagaugacuccaaauacuaauucuauaucaggauucaaucugggaacaga

SEQ ID NO: 4200882 - RNA, 65 nt, Human
ucugucuguggagcccucauaagcagcauccugccuuagagauggguuuuacuuagaauuacaga

SEQ ID NO: 4200883 - RNA, 56 nt, Human
ucugucugugugcaugacauguguuaugaagaaaacacauugaauacagagaugga

SEQ ID NO: 4200884 - RNA, 74 nt, Human
ucugucuuagaugcagagagcugcuucaucuggaggucacauccuuuccagggcagcucucaucugaugacuga

SEQ ID NO: 4200885 - RNA, 89 nt, Human
ucugucuucaccuuugcuguuucucucccuuucuugugauccaguuggagcaucaguuuuagaggggugaaaagagcugaggaggcagg

SEQ ID NO: 4200886 - RNA, 103 nt, Human
ucugucuugaugggggagguagagagccuggugaucacuucaguggauaugucuugugacauuguggacugaucagggcuagguccucugcuagaggacauga

SEQ ID NO: 4200887 - RNA, 70 nt, Human
ucugugaaauguguaauguggaugccauaaaaccauaauacugguagccaauuuaaacauuuccuaagga

SEQ ID NO: 4200888 - RNA, 55 nt, Human
ucugugaacaucacauugacagucuuuaucgugagauguccagugaugucaagga

SEQ ID NO: 4200889 - RNA, 64 nt, Human
ucugugaaugguggccacgcguuuggauguuacagagcaagcacguucuucauuacuucacaga

SEQ ID NO: 4200890 - RNA, 58 nt, Human
ucugugacaucaggaccagauacuccauccccagcauccagaugccugaugucagagg

SEQ ID NO: 4200891 - RNA, 98 nt, Human
ucugugaccacaugcacaucauuuaagcucucauuauuauuauuucguuaucuauaaaauggggaggguaagacuuaaaugauauguauguuugaaga

SEQ ID NO: 4200892 - RNA, 57 nt, Human
ucugugacucauaucuguagauagcaauuuucuuacagguguuuguugagugauagg

SEQ ID NO: 4200893 - RNA, 74 nt, Human
ucugugagcuggcacuuuuccugggaagguccagagcuggccuucagggcaccaaaaaagaugccacuccuaga

SEQ ID NO: 4200894 - RNA, 55 nt, Human
ucugugaugaggcuuauuuuuaguuacuaacaauuuuugaagccuaaauuacaga

SEQ ID NO: 4200895 - RNA, 112 nt, Human
ucugugauguaggggggugugugugucuguguauguguacauauauauaaguauauacaugugggucuaaacauauuauacagcuauaaauauauauuguccuucuuauaga

SEQ ID NO: 4200896 - RNA, 114 nt, Human
ucugugauuugagucccuuggcucgguguuaauauugaguguuugauggcagcagaagauguucaguaagcacuucuagagcugaagauagcugugcaagucuguaguaauagg

SEQ ID NO: 4200897 - RNA, 69 nt, Human
ucugugcacaauaggcauuuuuuuucagauuccuuaguaggauaaauaggagaauguuuggaacacaga

SEQ ID NO: 4200898 - RNA, 89 nt, Human
ucugugcucugcgggagccaaagcagcuuucggcccucggggcugguggcgcccugggaagcugcuuggcucaggggaaggagcaggga

SEQ ID NO: 4200899 - RNA, 126 nt, Human
ugauuauuuuuaaaauucucuuucccuguggcugguaguaucguuuuuccaugaagugguaucagagauuaaaugguguuaucuguccaugaacaauuuacuuacuggagcaugaaaaagugauua

SEQ ID NO: 4200900 - RNA, 55 nt, Human
ugauuccacucugaggaucguauuggauuuauacuuaacucaaaugguggaauga

SEQ ID NO: 4200901 - RNA, 79 nt, Human
ugauuccaggacagcaucuaguacagucuaguccucaggaaacagggacugaaauucaacauggaugaaaccugaauca

SEQ ID NO: 4200902 - RNA, 80 nt, Human
ugauuccgguguuguuugcuucagccaaacuccucugucuccauuggaguagucagcagauaauauagguugaauaauca

SEQ ID NO: 4200903 - RNA, 100 nt, Human
ugauucgaauaucuggcguguuucacaaggaaagaaccuccugcuguauuuuuaaacguguguggaaaguuuuccaugguaaacggaaaucagagaauca

SEQ ID NO: 4200904 - RNA, 76 nt, Human
ugauucuaagagggucaccccaccugcuggccaugagugauuggucagaggugagcaugugaccaaagguggguca

SEQ ID NO: 4200905 - RNA, 61 nt, Human
ugauucuaagcacgcugaagucuuacagucaguacuguggagaaauagaagcuuagcagca

SEQ ID NO: 4200906 - RNA, 57 nt, Human
ugauucugcuuauggguggauuuauuauucuauaugaagaacccauucagugaauua

SEQ ID NO: 4200907 - RNA, 60 nt, Human
ugauucugcuugccuggacagcguuaggccuguuuccaggccugaggcaaguggugguca

SEQ ID NO: 4200908 - RNA, 64 nt, Human
ugauucuguuuacucagaaauacaacguuauuaaaauguuguucuuuugcuuagacagauagca

SEQ ID NO: 4200909 - RNA, 79 nt, Human
ugauucuuccauaauucugcauaauuuccuggcaguaauuucuuuacuucuugcuuuauuuaggagauggaaucaguca

SEQ ID NO: 4200910 - RNA, 70 nt, Human
ugauucuucccucuuucacugugauuuuaugcaaguaaaaucacacaaguagauggggaaaccagaauca

SEQ ID NO: 4200911 - RNA, 91 nt, Human
ugauugaauggcaauguugcugucuuuuuagagaguaggauuuaaaauuuugaguugcugaaaaggcuugcgugaugugcuagaaaaauua

SEQ ID NO: 4200912 - RNA, 128 nt, Human
ugauugaggguggcuucuggagcaugggucacgcagcacucuaagccugccccgggcacgggccaagcaugcugcugaggcuggaauauguugcccaucagagaguugcaggaagccacugcauguca

SEQ ID NO: 4200913 - RNA, 58 nt, Human
ugauugauggaggugauuuacccuugaucaaguucauacugagucacucuuacaguca

SEQ ID NO: 4200914 - RNA, 88 nt, Human
ugauugauuagcauguguguguguucucaauuauugaugguaauggcccguggauguaaugugaacuugccaaugcugcugauaaucg

SEQ ID NO: 4200915 - RNA, 98 nt, Human
ugauugcuucaugaauuucuucauaaaauggcuuguucuuuaauaucaaauaauaaaacguagguauuagggcccauuuaaguaauuuagaguaauua

SEQ ID NO: 4200916 - RNA, 82 nt, Human
ugauuggggcauauguguuuguauaguugcugguauuucaggccaaugacugcuuugacaaaugauaccuugcuuucaauca

SEQ ID NO: 4200917 - RNA, 57 nt, Human
ugauuguaaugugaauaagccaugucuucauagcccugggucauucacauugcuuca

SEQ ID NO: 4200918 - RNA, 56 nt, Human
ugauuuacaguagugucuaaacauugaguggcccuagauauuucuacuguggauua

SEQ ID NO: 4200919 - RNA, 75 nt, Human
ugauuuaguucuauaaguaguuguugaagacuuucuauauugaaaguuguuucuagacacuucagggagcuugca

SEQ ID NO: 4200920 - RNA, 80 nt, Human
ugauuucccuaaaagcacagggugcuagagagucccuaagaacuccucagacaccucucaagcccugugcuggggaaaca

SEQ ID NO: 4200921 - RNA, 111 nt, Human
ugauuucuuucuguggccaacuauucagcuuaauauauuaaaagccauuauuagagguuuuugaaaguccuucuugaguuacaaauaguuggaugaaugcuuuagaaauca

SEQ ID NO: 4200922 - RNA, 72 nt, Human
ugauuugaucucauucagcaauguucuuugaaauacagucagaaugcuccagagcugaaagagaucaucuca

SEQ ID NO: 4200923 - RNA, 63 nt, Human
ugauuugcauggagaauaacagaauugaaguagcuugagucuguuacuuugucuuugcaauca

SEQ ID NO: 4200924 - RNA, 70 nt, Human
ugauuugggaguauugcuugagcccaggaguuugagacaagcuugggcaacacagcaagaccccaccuca

SEQ ID NO: 4200925 - RNA, 88 nt, Human
ugauuugguagucucaguaauuaaugcuuuugugauuacguuaaguauuugugacuaaacgcaugaauagcucaacugaccaaaauca

SEQ ID NO: 4200926 - RNA, 89 nt, Human
ugauuugguauauuuacagaauuaucaggaaauguuauaggaguuguauugcuuugugacagcucuuguauuucugacauaccaacuca

SEQ ID NO: 4200927 - RNA, 58 nt, Human
ugauuuguuuagugccaaguuuccagaagacaacaaagugugguacuaaaugaaauca

SEQ ID NO: 4200928 - RNA, 66 nt, Human
ugauuuuagaagccagaguuuuugagaacuuuuugggaagauucuacaaacucugguaaaaaauca

SEQ ID NO: 4200929 - RNA, 59 nt, Human
ugauuuucaugggugaucuuugauuucuuauaaucacaauggauuguccugaugaauca

SEQ ID NO: 4200930 - RNA, 81 nt, Human
ugauuuucauuuuucuugucugugaaauggaaauaguaaugaaaauacuaaucucugcuuuaugauguauugugagaauua

SEQ ID NO: 4200931 - RNA, 100 nt, Human
ugauuuuuuuuagauauucaccccauuuccacauuguguuaugggaaucugaacucacacacaucuccagaagugggcugaauuggucuaaggauaauca

SEQ ID NO: 4200932 - RNA, 56 nt, Human
ugccauugugggaggacuccugcuccaauacacagcagucucucccagaaugagca

SEQ ID NO: 4200933 - RNA, 66 nt, Human
ugcccaagagcuagaaauugguuagaaacugguugagccaggauuugcaccuaagucuaucuggca

SEQ ID NO: 4200934 - RNA, 62 nt, Human
ugcccaagccaggcuguuuuuauuacuguggcuuuacaauauguuuugauagcuggugggca

SEQ ID NO: 4200935 - RNA, 82 nt, Human
ugcccacaguacguuuuaaacacggagccagcauuuuuaaaguuuagauuucuggcuccuguuuaaccagcugcugugagua

SEQ ID NO: 4200936 - RNA, 55 nt, Human
ugcccagauggaggcccugaccccaaaggucaaaggcuaauuaaccaccugguca

SEQ ID NO: 4200937 - RNA, 55 nt, Human
ugcccagccuaaacuuggcaagauaauaaaucaccuuuuuaagugucguugggca

SEQ ID NO: 4200938 - RNA, 75 nt, Human
ugcccaggagcugcgggucauccccuguacucaccgguuucacaggaagugcguggaccccuggcugcugcagca

SEQ ID NO: 4200939 - RNA, 57 nt, Human
ugcccaggcuucacccucagagaaucaggcgcaauuggucugggguguggccuggca

SEQ ID NO: 4200940 - RNA, 69 nt, Human
ugcccaggggcugcugguauuuccaguuuggcugcacgaagucaacuggcuuuucagauggcccaggca

SEQ ID NO: 4200941 - RNA, 82 nt, Human
ugcccagugucuccuuguggaucucaaggaugugcuuccacauagcagcauguucuucagauggacaaggagacacugggua

SEQ ID NO: 4200942 - RNA, 56 nt, Human
ugccccagacauaacagcagagaggugaucaguggccucggugggauguuggggca

SEQ ID NO: 4200943 - RNA, 75 nt, Human
ugccccaggugucuguggccagcccuaauggaagacccacagagggcuggauguacaggucuaacacguggagca

SEQ ID NO: 4200944 - RNA, 67 nt, Human
ugcccccgcuucucuacucccagccagugucagugacaaggcacugccugggagggaggcggcugca

SEQ ID NO: 4200945 - RNA, 55 nt, Human
ugccccugaccucaggcgaaggaggggguucucauccuuuccugagcucagggca

SEQ ID NO: 4200946 - RNA, 66 nt, Human
ugccccugccagcucaaagcgcagcuaggcgcuaagccucuguugcagcgagcugguuccucugca

SEQ ID NO: 4200947 - RNA, 86 nt, Human
ugcccguuuccucuguaacauguaggagagucacaaugcccacaccacguggauguguuaggaacccuaguagcagagcacgggua

SEQ ID NO: 4200948 - RNA, 64 nt, Human
ugcccucugcaggccgccaugggaagugcacacugcauccccuaggcaggauuguaggcgggua

SEQ ID NO: 4200949 - RNA, 56 nt, Human
ugcccugcagcccuucaaaggcugagcgcugugcugugcgggaaaggcugcuggua

SEQ ID NO: 4200950 - RNA, 116 nt, Human
ugcccugccccaccuuugaguguccuguggagaggacuggaggucacuuccugaagcuugucagaaaggcgccuuccuucuccucgcaggagucucuaaaggauguuuaagggaca

SEQ ID NO: 4200951 - RNA, 80 nt, Human
ugcccugugaagaguuaugagaagguggaggagcagugaagggaauccuacuuugaccaccaucugauuaaucuagggua

SEQ ID NO: 4200952 - RNA, 87 nt, Human
ugccgucauaaugucuuagugcagugcauuacucacauguuuaugcugcugguguaaacagacugcacugccagucauaugaaagua

SEQ ID NO: 4200953 - RNA, 66 nt, Human
ugccgugccgggcuggcugcucugauacccgucaaugggcucauucagccagggcccgguuuugca

SEQ ID NO: 4200954 - RNA, 129 nt, Human
ugccguucuuucaaaaucaucuucaaugagguugccuucuuggccugugcuucccuuuauucaucugggggcacuggaggccaaggagcugcguggagucuucaccugauggaacugauggaaguggca

SEQ ID NO: 4200955 - RNA, 104 nt, Human
ugccuaaagugacaacaucuccuguuucuuuuaucuggccuggugcccuuuuggaaugccacagguacuaugggagagagggagaaggucuguuuucuuaggca

SEQ ID NO: 4200956 - RNA, 98 nt, Human
ugccuaaaucagcuuccugcuguguuccucaguuucaugcugcccacuguuagggccauguucugcagagaagcaguagaaggaaguuguuaagggca

SEQ ID NO: 4200957 - RNA, 66 nt, Human
ugccuaauauacacauaugcauauaugugcauauauuuaucagguauguauguguguauauuuaca

SEQ ID NO: 4200958 - RNA, 88 nt, Human
ugccuagcggguccuugggucagugagugaggugccgcgcguaaaccccgcacucuccucccugcccacagggaucgcccguugugca

SEQ ID NO: 4200959 - RNA, 57 nt, Human
ugccuaugccuaccuccagaaaauguugauucauuggucuggaguagagcacaggca

SEQ ID NO: 4200960 - RNA, 71 nt, Human
ugccucaaagcgugauguucugagcugaaaauuacauauaguguaaagauccuuagcaacaucaaagggca

SEQ ID NO: 4200961 - RNA, 58 nt, Human
ugccucagagugggcuugcuaucccugaggccaggcgaggcgagcugggcucugugca

SEQ ID NO: 4200962 - RNA, 80 nt, Human
ugccucaguuaucccaaaugcaaaauggagauaauaauuguaccucucucacaggguuguucugaggauucaaugaggca

SEQ ID NO: 4200963 - RNA, 83 nt, Human
ugccucauucaaaaguucucacccagacauguaucccugugagguguugucugcauguguguggcugacaauuuuuugaguca

SEQ ID NO: 4200964 - RNA, 99 nt, Human
ugccuccucagaaugaccugggccaggcuugggaaugccagcgcuuuuagcaguugauugaucugcauuugguuuggcucaggccaacugagaggggca

SEQ ID NO: 4200965 - RNA, 84 nt, Human
ugccucgcgaggugugccucugcaccaguacugugcccggccuggccuacggcaucugcgcggcgcagaggauccagcaaggca

SEQ ID NO: 4200966 - RNA, 77 nt, Human
ugccucuaugaguuuucuaugccacaccugguggcugccugccucaccagugggaaguggaaaaugaaaucuuggca

SEQ ID NO: 4200967 - RNA, 81 nt, Human
ugccucuccucacccucccucucuuccugcagggccugggaagggcuuugagggagccugggagccaugugaagaggggca

SEQ ID NO: 4200968 - RNA, 67 nt, Human
ugccucugaguuuggagaagagccuucagcccugaggauuagccugcugcuuuucuccuucaagcca

SEQ ID NO: 4200969 - RNA, 76 nt, Human
ugccugagcaugcuccucuuuuccaucuguguuguuuuuuaccccagcauacuguuggaaggguugcucgaaggca

SEQ ID NO: 4200970 - RNA, 56 nt, Human
ugccugauaguaauagugauugugaaagaaucacuaauucaguauuaccucaggca

SEQ ID NO: 4200971 - RNA, 72 nt, Human
ugccugcaaaagcucugggaaugcuuaucugugcuggcagauaacugcucccagguuuaaacuucaaaggca

SEQ ID NO: 4200972 - RNA, 90 nt, Human
ugccugcaucacugguggcccucaguguucuccuagguugauugcauuaccuuccuagguggacauuuggccacuaguuccuaucaguca

SEQ ID NO: 4200973 - RNA, 78 nt, Human
ugccugcccucagggagcucacaguccaguagaaaguucucugaggaugggaugggcucucugguacuggguggugca

SEQ ID NO: 4200974 - RNA, 59 nt, Human
ugccugccugccugccuccccaagagcauaaacgucugggucucuaguacaggcaggca

SEQ ID NO: 4200975 - RNA, 57 nt, Human
ugccugcuuguguaccuggugaugguauuguacuucagaaaacaggugagggaggua

SEQ ID NO: 4200976 - RNA, 65 nt, Human
ugccuggcaccccagucugcacagccccgcacgcccugggggaguguaggauggggguggaggca

SEQ ID NO: 4200977 - RNA, 67 nt, Human
ugccuggcucccccaucauagcugucaucccucuguggauaucaggcccaugagggcagccacagca

SEQ ID NO: 4200978 - RNA, 56 nt, Human
ugccuggggcuggucaccggggcuuacagcaaggaacuggaagccuuuccagagca

SEQ ID NO: 4200979 - RNA, 64 nt, Human
ugccugggugcccucugcuccuccgggaacuucuccgagcccgcaggccggugcgcaccaggua

SEQ ID NO: 4200980 - RNA, 66 nt, Human
ugccuguauuuguccucuauuuauuaaauagauuuuuugguagaaagaaggaacaaaguagaggua

SEQ ID NO: 4200981 - RNA, 103 nt, Human
ugccugucuuguaaaugaagaaauggagauuguagucauaaucucuggaguagaaagagaacauucaagauaaucuagucauuguuucuuuacgaucaaggua

SEQ ID NO: 4200982 - RNA, 61 nt, Human
ugccugugacccaaggaugcgauaacuaccaaaauuuugcuggggcuguugggaacaggua

SEQ ID NO: 4200983 - RNA, 56 nt, Human
ugccugugcccuucuuggcauucagaaauuccucugugccacaggaaguaugggca

SEQ ID NO: 4200984 - RNA, 77 nt, Human
ugccugugguacauuaauaccucugauuucacuccaucacuacagauuuauuguauugguguacuuauagcagagua

SEQ ID NO: 4200985 - RNA, 113 nt, Human
ugccuguucccaccgccucauggccuggagaagucuauuucagucuuacuagucuguuagaagcaacaguaauuaaaauggaucugcaggcuucuggggucuuuggauaggua

SEQ ID NO: 4200986 - RNA, 71 nt, Human
ucuuggcuuugguaguucuuucucaauguucaaggccgccuugagauuuggagguaauucccucgucaaga

SEQ ID NO: 4200987 - RNA, 129 nt, Human
ucuugggaaggaugaaaugcugcaguuuucauugaacuggaaccuuuuauucagucuggauacccgggcugccguaagucaggauuaccgcuuguuuacuacugcuuucucaguuucgcuuucccagga

SEQ ID NO: 4200988 - RNA, 74 nt, Human
ucuugggcaauaaaauguaaugauugggauuauauuuuucccaauaaaauucauuuucauugcuauggacaaga

SEQ ID NO: 4200989 - RNA, 68 nt, Human
ucuugggcugaguggcagccagagucaagcccucugcagacucugcagagcuauucagcuuauacaga

SEQ ID NO: 4200990 - RNA, 61 nt, Human
ucuugggucaugaucacagcuagugcuaaaccacuccaugcugccugaucauacaccaggg

SEQ ID NO: 4200991 - RNA, 76 nt, Human
ucuuggucuuccuugagucauggauuggcaagaaaacauucauucuuaauaaaggcucagggaaccagauccagga

SEQ ID NO: 4200992 - RNA, 84 nt, Human
ucuugguguucgcucucaaaugggcucuuuucaguaucacauaucauaugcaggaugcagaggggcccggcuuacauaccgaga

SEQ ID NO: 4200993 - RNA, 55 nt, Human
ucuugguguuugucuacaggccgccccugcugcaugaaaaagacagacaguggga

SEQ ID NO: 4200994 - RNA, 98 nt, Human
ucuugguugcuuccaaguuuuugcaguuaaaaauaaaccuucauauucagauuguugcgugaauguaaguuuucagcucauuuggguaaguaccaaga

SEQ ID NO: 4200995 - RNA, 84 nt, Human
ucuuguaaauucucauuuguuuaaaagaaaucauagaaaacacaugucuucuggagaugacuuuuagaaauggaguuguuaaga

SEQ ID NO: 4200996 - RNA, 76 nt, Human
ucuuguaaggaugucagucauuuuggauagggcccucucuaauggccucauuuaacuuugauuaccuccucaaaga

SEQ ID NO: 4200997 - RNA, 95 nt, Human
ucuuguagaauuagaagcgcaggugaccagaagucggcgguguuaaagaagccacaucacuucucuggcuaucuguuucuaugucuuacacuaga

SEQ ID NO: 4200998 - RNA, 77 nt, Human
ucuugucaaaauguaaucuuauugcagaauuucuuacgcucucuagaaugauguaacugguuauaauuuuugacuga

SEQ ID NO: 4200999 - RNA, 93 nt, Human
ucuuguccuggaagauggguucgugauggaagaugauuaauagcagcuugacuuuguuaaacaguuacaugugcugggcacccuaggacaaga

SEQ ID NO: 4201000 - RNA, 84 nt, Human
ucuugucucacauccuucauacucagcucugcccagugcagcucagucacaaagaagcugugguaugaaaugugaagaucugga

SEQ ID NO: 4201001 - RNA, 85 nt, Human
ucuugucugucuuuguuugcuuuucuauaagaacuuucaaguaagcuugucuaguuccuaagagaauugucagggauacucaaga

SEQ ID NO: 4201002 - RNA, 56 nt, Human
ucuugucuuagagugaaaacuuuaaaaguuuaaaggaaucaguuuuagagauaaga

SEQ ID NO: 4201003 - RNA, 79 nt, Human
ucuugucuuagaugcugggaccacagaguguuguggcugacuguuuauuugacacucuccuccaguggauaggccauga

SEQ ID NO: 4201004 - RNA, 111 nt, Human
ucuugugaggggaguggcagggguucauucagaggaaugagaaucuuugaccgaagagguaauagugaagauaccucaauucuuugaaauuauugucccuuuuuuuaauga

SEQ ID NO: 4201005 - RNA, 57 nt, Human
ucuugugcaaacacaggcagugggccaguuuggccugcaggcuguaguuugauaaga

SEQ ID NO: 4201006 - RNA, 57 nt, Human
ugaaaagagcuggcagcuggauccuucuagcacagacucagcugccuuuucuuugca

SEQ ID NO: 4201007 - RNA, 77 nt, Human
ugaaaaggacacagaccuuucuguucuacagcucuggucuggaacaggaauauguuugaaauuauauguaauuuuca

SEQ ID NO: 4201008 - RNA, 71 nt, Human
ugaaaaucaccagcauaccuuuucacaguguacaugcucuguccgagguccagugcucuuggugguuauua

SEQ ID NO: 4201009 - RNA, 69 nt, Human
ugaaaaucauagccaugaacauuuguaugcuuacaaagcugccaaaugaugcauggcuagugagucuca

SEQ ID NO: 4201010 - RNA, 89 nt, Human
ugaaaaugcugaauagacuugguuaguaaauuugaugagugaaauuuuauuaugaaaauaccugccaaguguucugucaugcauuucca

SEQ ID NO: 4201011 - RNA, 80 nt, Human
ugaaacagugggcuccugaaauuccauuaucugcagagacugcccagcaguuaggagaagagucagggccuaaugucuca

SEQ ID NO: 4201012 - RNA, 64 nt, Human
ugaaacuguggaaaauccccagcaaccuuaaaugagauaggugcaggugauuaauccaguuuca

SEQ ID NO: 4201013 - RNA, 70 nt, Human
ugaaagaaaaugaaugaaugaaugaaugaggacacuuuuguucuucuggguaauucuucuucaucuuuca

SEQ ID NO: 4201014 - RNA, 58 nt, Human
ugaaagcacugauucucaacucaaaugugccugcacaugggaauggccaguauuuuca

SEQ ID NO: 4201015 - RNA, 55 nt, Human
ugaaagcagauagcucuguuguugcauauuugacuuaauagagcuacugcuuuua

SEQ ID NO: 4201016 - RNA, 55 nt, Human
ugaaagcagcaccaauaccauugcggccgccugagugccugagugcuugccuuca

SEQ ID NO: 4201017 - RNA, 56 nt, Human
ugaaagcagugccaugauuaugaguccgggcugcauagucgggccaccuguguuca

SEQ ID NO: 4201018 - RNA, 59 nt, Human
ugaaagcuccuggaagcuugguaaagaugagaaacaaacaugagcuccuggggucuuua

SEQ ID NO: 4201019 - RNA, 114 nt, Human
ugaaaggcaauuuauuuaagucuggaaguuuagguugaagauaagaauuuugaaacuguucuuacuuuaucuccuagauuccaguguuacuuuuaagaaaucagaugucuuuca

SEQ ID NO: 4201020 - RNA, 64 nt, Human
ugaaagggacauagacuguacaucuggagcacaaaggcagguuuaaccagcuuuguccugcucg

SEQ ID NO: 4201021 - RNA, 66 nt, Human
ugaaaguagugcuuaccaaguguuucaugagaggcgaugauuauuaaauacaugagcacacuuuca

SEQ ID NO: 4201022 - RNA, 72 nt, Human
ugaaaguggugggcgaacucaucaauuagaaggaaguuaguguaaaauuuauggucuugccucccaccguug

SEQ ID NO: 4201023 - RNA, 65 nt, Human
ugaaaguucaauaccaauuugggccucagggucacugaguuacaaauaggaguggaaccuuuuca

SEQ ID NO: 4201024 - RNA, 65 nt, Human
ugaaaguucugggggagaagaacgaauugagaggauuauacguuggcugcuccccaaggcuagca

SEQ ID NO: 4201025 - RNA, 57 nt, Human
ugaaaguugcacauaagagaauaaucaucuaaaagauauucuuauuguguacuuuua

SEQ ID NO: 4201026 - RNA, 115 nt, Human
ugaaauaauuucuuauguuaaauagcuucuaacauuuauggccacuggacugauucuuagcacauuaauucuuccugucaugagguuuggggauacaucagaacaauuuauuuca

SEQ ID NO: 4201027 - RNA, 85 nt, Human
ugaaauacaguguguguucuuugauguguguagagaaagaauuguguucaggcaaguuuaaagaacccaugaauuguaaaaauca

SEQ ID NO: 4201028 - RNA, 58 nt, Human
ugaaaucugaguuuauguucccccaacaaauuggaggacacauuuauuucagaauuca

SEQ ID NO: 4201029 - RNA, 130 nt, Human
ugaaaugaaggugauaaguuagaagaccauugcaaaucccaacuuucuuucaaggcuugggcaaggaugauuuugcuggagguggugagaaaagguugauuugggagacauuugggauuaaagccuggag

SEQ ID NO: 4201030 - RNA, 68 nt, Human
ugaaaugaaugugauucgauaguuaucgcauccucauaaauguguuagauugaaucccauucauuuua

SEQ ID NO: 4201031 - RNA, 78 nt, Human
ugaaaugaguggcaguuugggagcuacaggacagcaaaaugcauucaguucaugucaguuuguaaauuacucacuuua

SEQ ID NO: 4201032 - RNA, 70 nt, Human
ugaaaugcaaaagagugagugguaaucuuuaaaagauuaaagagcccuuccaugacucuucuacauuuua

SEQ ID NO: 4201033 - RNA, 72 nt, Human
ugaaaugcauacuggacaagaaugacuguugguagcaaccacugaaacaauuuuuguugucuaagcuguuca

SEQ ID NO: 4201034 - RNA, 70 nt, Human
ugaaaugcugucuugaccuuucucucuccauugguauugcagauauucagagggaaggacagauguuuca

SEQ ID NO: 4201035 - RNA, 69 nt, Human
ugaaauggaaccucuggggcccuacaguuguucauuuccuggggggugacaaguagagguugcacuuca

SEQ ID NO: 4201036 - RNA, 63 nt, Human
ugaaaugguccauccuaaagaaguuggacagucuuaguucauuucccacuggacuauaauuca

SEQ ID NO: 4201037 - RNA, 85 nt, Human
ugaaauguggacuugaaauaucauuuucaucucccucuauauauagagggcagaugucaugauuguuucugaauccauucccuca

SEQ ID NO: 4201038 - RNA, 81 nt, Human
ugaaauuaaggaauuuggaggccucuccugcuuguccuuccuccaggguaucugcaugauccucuuuagauucuuaguuca

SEQ ID NO: 4201039 - RNA, 73 nt, Human
ugaaauuauucugugaaacagcucuggcaugcaauccagacccuuugcagccugcuguguuuucagaauuuca

SEQ ID NO: 4201040 - RNA, 58 nt, Human
uggcuccuuccgcagcaugccugcucacccccagaacccgcagcugugggaagagcca

SEQ ID NO: 4201041 - RNA, 99 nt, Human
uggcucuaaaucaacugggcacaguggcucacgccuguaaucccagaacuuugggaggcagaggcaggugggucacuugaguccacgaguuugagacca

SEQ ID NO: 4201042 - RNA, 81 nt, Human
uggcucuccuagugggucagacagccagugggcccuggcucuuucccaguuggcccgcugaucugaccccucuguugaaca

SEQ ID NO: 4201043 - RNA, 85 nt, Human
uggcucucucagcuguguuucaggcuuggugcuccagugcccuccucaaggccauaguggaggcagcagcugggugagagggcca

SEQ ID NO: 4201044 - RNA, 63 nt, Human
uggcucugaggcugugaggugcugcuuccaccuggaaaaacuggcccugagggcucggagcca

SEQ ID NO: 4201045 - RNA, 65 nt, Human
uggcucuggugacacacccuuccuugcguugugaguguguaaggcagguaugguaccaggcgccg

SEQ ID NO: 4201046 - RNA, 55 nt, Human
uggcucugucaaacugcacacaucccagccaaaggguagucaggggagggagcca

SEQ ID NO: 4201047 - RNA, 70 nt, Human
uggcugaaacauucugcaucucguacuuugauaaauuuaccuguauaucaggcagaauguucucugguca

SEQ ID NO: 4201048 - RNA, 57 nt, Human
uggcugaauaaaauaugguguugcuacaccucuacaccacagaauauuaugcagcca

SEQ ID NO: 4201049 - RNA, 65 nt, Human
uggcugagggcacuaugaagccaggaaagcaagaaccagaagauccucgugcuuccccugagcca

SEQ ID NO: 4201050 - RNA, 63 nt, Human
uggcugcacauucaugacccacugguguugguaggcauuucuggauuuuggaugcugcauaca

SEQ ID NO: 4201051 - RNA, 66 nt, Human
uggcugcccucucaggugaggcacaugugguggaaaaccaacuacaaccagcacuggagggcacca

SEQ ID NO: 4201052 - RNA, 78 nt, Human
uggcugccugccucugauucacaagacuccucagaauauuuauaugagcaugggcuuucucagaguucucaggagcca

SEQ ID NO: 4201053 - RNA, 77 nt, Human
uggcugcuaggaagcucaaagccaugauguaaguuuaagcacaguuacugucuugguuuagcuuucugggacaguua

SEQ ID NO: 4201054 - RNA, 88 nt, Human
uggcuggcaccauuagguagacugggauuuguuguugagcgcaguaagacaacaacaaaaucacuagucuuccagauggggccagccg

SEQ ID NO: 4201055 - RNA, 57 nt, Human
uggcuggcgccgggcuagccacaccuguuugccaucagggcugucucggcccagcca

SEQ ID NO: 4201056 - RNA, 61 nt, Human
uggcugggaaacagaaggauaucacugugaauuuugacaaucguccaguguuuuccaguca

SEQ ID NO: 4201057 - RNA, 61 nt, Human
uggcuggucaaacggaaccaaguccgucuuccugagagguuugguccccuucaaccagcua

SEQ ID NO: 4201058 - RNA, 69 nt, Human
uggcuggugaguucagagaacccaaagugggacagaugggccaugcugggguucuuggacuuaccacca

SEQ ID NO: 4201059 - RNA, 59 nt, Human
uggcuggugccuacuguacugacaaagcagauccaggcugucagucuaggaaugagcua

SEQ ID NO: 4201060 - RNA, 71 nt, Human
uggcuguagggaggaaggguuggaaaaaagagaagauguuuucuaucuuggaccuuuaccuaaaauaggca

SEQ ID NO: 4201061 - RNA, 62 nt, Human
uggcugucagaaggugaaggguaaggagagacucaaauugcucucagucuucuggcuugcua

SEQ ID NO: 4201062 - RNA, 72 nt, Human
uggcugugcccagcuccagcucuggaagagucucucugaggagcagggccuggagcugggccugcaaagcca

SEQ ID NO: 4201063 - RNA, 59 nt, Human
uggcugugguuuaucccaguuccugggcuggaaaggugcagugguuggggauccagcca

SEQ ID NO: 4201064 - RNA, 101 nt, Human
uggcuguguugugugucuuguuugauguaaagauaguuucuguaauaguuuugcaguuugauuguucaucuuuaggucuucaauuacaaccugcacaucca

SEQ ID NO: 4201065 - RNA, 56 nt, Human
uggcuguuacucuuuucauuucuggagcauaauagaaguagaagggagaaggguua

SEQ ID NO: 4201066 - RNA, 77 nt, Human
uggcuguuccuggggcuuagcaauggaguuggcuacucgcuuauuacauuucaguugguggguccccaggcuagcca

SEQ ID NO: 4201067 - RNA, 70 nt, Human
uggcuguuucaugcugugucuacaacuuaaggccauuucuuccagguaguagaugcaauauguacagcca

SEQ ID NO: 4201068 - RNA, 74 nt, Human
uggcuuaaaaguccacaaaauuacuaucuuacagcucuguagggcagaaguucaaugugguucuuacuaggcua

SEQ ID NO: 4201069 - RNA, 129 nt, Human
uggcuuagaagauggagaaaggggaaaauaagccaagggcuguaggagcuggaaugggcauaaaaauagauuguuugcuagagccugcagaaggaacuuggcccugcugacaaccuugauuuuaggcca

SEQ ID NO: 4201070 - RNA, 79 nt, Human
uggcuuagcaaggaccuuccugggagguaaaccagcauccccuguggggagcuuaucuacucagagucaccgcugucca

SEQ ID NO: 4201071 - RNA, 84 nt, Human
uggcuuauagaugcugggacguacuuguucauuaguucaaaccacguuaaaagugagcaguuuguuccagaaucaaguauguca

SEQ ID NO: 4201072 - RNA, 63 nt, Human
uggcuucauguaguuugaguugaugugucauuugacaccaaaauaaucuugacuacugaauca

SEQ ID NO: 4201073 - RNA, 66 nt, Human
uggcuucgcuccgguggugcgcccagcccacgccuccgggcugcagcugcgggaccggagcggcca

SEQ ID NO: 4201074 - RNA, 56 nt, Human
uggcuucuaaaaugacauccagcuugguucuccaacaugugugcaaauggaagcca

SEQ ID NO: 4201075 - RNA, 56 nt, Human
uggcuucugcuuucaguggaggcauugagaagcugacaagcugagugcagauguua

SEQ ID NO: 4201076 - RNA, 80 nt, Human
uggcuugccuuuggguccugugugcuuucuuuagguucuaauuagaagccuggaguugguacaauggggcaggcaaggca

SEQ ID NO: 4201077 - RNA, 59 nt, Human
uggcuugcucugcugauaggauuccaugcuugccuggugcccuuucagaacagaagcca

SEQ ID NO: 4201078 - RNA, 66 nt, Human
uggcuugggggcuacccuaacauugccuguaugaaaugcaggcuuugacuuggggcagccaggcca

SEQ ID NO: 4201079 - RNA, 81 nt, Human
uggcuuucagcuauuucuguaguauaguuuauuuucagugccuuucucauuaaaaaaguauuacauuuaguaauuaggcca

SEQ ID NO: 4201080 - RNA, 58 nt, Human
uggcuuucucuaggagcuuuccaagauuuguuuugcaaagcugccaaggagaauacua

SEQ ID NO: 4201081 - RNA, 78 nt, Human
uggcuuucuuuaguuaguagauaauggcaacugaauaaauuaauugcuuucccugccucuugcugcuacugaagacca

SEQ ID NO: 4201082 - RNA, 130 nt, Human
uggcuuuugcuuguuucuugaauauaauccugaaggcagaaucuaaguuuuguaacugaugauuuaugaacauuauuuuugucuagaagaggugauauuccuaccuacuuugaaaucagcuuggagugca

SEQ ID NO: 4201083 - RNA, 60 nt, Human
uggacucuggaauuguacugcuggguuagaaucccagcucucgcacuuacuagcuguuca

SEQ ID NO: 4201084 - RNA, 83 nt, Human
uggacuuucuacaagguugucuuauggcauguccacuggcuuccccuggaaguaagugauccaagagagaacaagagaaucca

SEQ ID NO: 4201085 - RNA, 72 nt, Human
uggagaaaaaggaggcagcaaauguggagcuuccuugaucugucucucuugauugcuugccugccuuuccca

SEQ ID NO: 4201086 - RNA, 76 nt, Human
uggagaagaguuuaugauauaacauguuuagugauaaaagcaggacaaaaaacuguucguauuauagaauacucca

SEQ ID NO: 4201087 - RNA, 57 nt, Human
uggagaagauuggucaccauucuggugagaagguggaagaugaacccaaauucuuca

SEQ ID NO: 4201088 - RNA, 58 nt, Human
uggagaagcagcuucuugaugaagccccauccuguggguuccaucaaagaaauuucca

SEQ ID NO: 4201089 - RNA, 70 nt, Human
uggagaagcaguuacaguuuugaagcagggcuuuauuugauccugucucaaagcaguauuggauucuuua

SEQ ID NO: 4201090 - RNA, 72 nt, Human
uggagaagcuuaggaggaugaugaacaucauaccaguggugguguucagugucaaaccucuuaauggugcca

SEQ ID NO: 4201091 - RNA, 76 nt, Human
uggagaauaauuauuucuuaauuuguuaccccuccagaguaacuuaagggcuugcagaaaugagaaauauuuucca

SEQ ID NO: 4201092 - RNA, 69 nt, Human
uggagaaugcuguuuacugagaacacuucacaaaagucaucauuguuuucucugagaagcaguucucua

SEQ ID NO: 4201093 - RNA, 94 nt, Human
uggagacacuugcguuugaacuguccaggcugccgacaagaugcuguuuucuccuauaucucacgaaggcuguggcauuaaacguuugucucca

SEQ ID NO: 4201094 - RNA, 83 nt, Human
uggagacagaccacuuggauaagaaacagucaagagacuuuaucaucuguuucucccauguccaagugaguauucuguaucca

SEQ ID NO: 4201095 - RNA, 63 nt, Human
uggagacaggucacauauccucgguuuggaaguggugccauuugcaguauguauuuguaucca

SEQ ID NO: 4201096 - RNA, 69 nt, Human
uggagacuuggcuucugucccugcuacauugacuuuuugucagcaggcagguagcaagcagugucuccg

SEQ ID NO: 4201097 - RNA, 111 nt, Human
uggagacuugugacucuugugguugaguagugcugcaaggauggagaggcagacaccugcccugcagacccugcaguguccugaauagccaagcaaggaagcaggucuuca

SEQ ID NO: 4201098 - RNA, 68 nt, Human
uggagagaagaggccaagccagacugugcaguccugacugcaugauccuaguggggccuuucucuuca

SEQ ID NO: 4201099 - RNA, 118 nt, Human
uggagagcaaauagcaaguuauucuggcagugaaauagggcaauggacuacaaaagguauaacuucaaauguaucuuuuccaacugcuuuugucuuuguuuuguuuuguguaccuuca

SEQ ID NO: 4201100 - RNA, 60 nt, Human
uggagagcaauguugcuguuguuguuuaauuuguuauaauacagcaacggagguuuucua

SEQ ID NO: 4201101 - RNA, 67 nt, Human
uggagagcagggcuggaguucagacaaccaccugaguguuauuccuguuacucagcccuguucucca

SEQ ID NO: 4201102 - RNA, 72 nt, Human
uggagagcuuuaauguguaaucuuagaugggucuguaacaccccagagccaauacacugaagaucuaaucca

SEQ ID NO: 4201103 - RNA, 69 nt, Human
uggagaggaagaggaggagccugaaaauccagacacaggcuugagaguuccuccucuuuccacuggcca

SEQ ID NO: 4201104 - RNA, 75 nt, Human
uggagaggcaggaaggguucuuugugaaagaugcuaacugcauuucuucagagagagcuuuccccaucugcucua

SEQ ID NO: 4201105 - RNA, 76 nt, Human
uggagagggcaaagucagggaagaguggcuggcauauugcuagagagucccuuccgauuuaccucugcuuucucca

SEQ ID NO: 4201106 - RNA, 61 nt, Human
uggagagucaguuaugucaagugcuggauagcaauaagcaucauuuuuauuugacucuuua

SEQ ID NO: 4201107 - RNA, 73 nt, Human
uggagaguuguucaacgugugugaaagaaaacguucuggagaccgguuucacacaacgugaauauacuuaaca

SEQ ID NO: 4201108 - RNA, 129 nt, Human
uggagauaaggccuuaauuaagaagugucguacugauaggggaagucucagaaugcaguggcuagcuucugcagagaauuguggggcuucuccagugaccccacagaagaguuaccugccacgucucca

SEQ ID NO: 4201109 - RNA, 68 nt, Human
uggagaugacccagaggagugacaagaacauaaacuugggaaucaaacagaucuggguuuaaauccca

SEQ ID NO: 4201110 - RNA, 55 nt, Human
uggagaugaggacauggacgucuuugagaaaggccuuauuccuccuacaucucca

SEQ ID NO: 4201111 - RNA, 58 nt, Human
uggagaugcacgagcagguggagcagcugaagcagagcauccaccgcgugcaccucua

SEQ ID NO: 4201112 - RNA, 82 nt, Human
uggagauggauacucaacuuugaugguagggauaaacuauaugcucccuccauaacagaggugagcaauccauugcauucca

SEQ ID NO: 4201113 - RNA, 69 nt, Human
uggagauggccaguguugagaucaggcauguaggauuucucccagcuucucagcccacugccauguuca

SEQ ID NO: 4201114 - RNA, 108 nt, Human
uggagauucucagaggcauucccagcagcuccaucauggcagcagcagugaccauuggggucaucuugaaaccagauggacuguuugcagucucagugagaguucuca

SEQ ID NO: 4201115 - RNA, 86 nt, Human
uggagcaaugguucucaaagugugcucccuggagcagcagcagcaccagcaucuccugggaacgcuuuagacaugcacauccucca

SEQ ID NO: 4201116 - RNA, 55 nt, Human
uggagcagggcagguaaggaucagacugcauuuggcucauggcugugcugcacua

SEQ ID NO: 4201117 - RNA, 114 nt, Human
uggagcagggccugugugagagggagauggugggaggccagguggcagccuucauucauuucuucacuuugccucuggccaucccccauuaagcuagaacagaguccugcucca

SEQ ID NO: 4201118 - RNA, 63 nt, Human
uggagccaagcaauauacccaacccauguauugugaaccauggggaaagguagcauggcugca

SEQ ID NO: 4201119 - RNA, 57 nt, Human
uggagccaggcuggcccugccacucaugcacuguguggccuugggcaaauuguuuca

SEQ ID NO: 4201120 - RNA, 55 nt, Human
ugggugguugcugaggcuccuucgcucuggccuggagagaccucaugaccaguca

SEQ ID NO: 4201121 - RNA, 57 nt, Human
ugggugucacaucuuauccuuggguaucaguuugcuccuggacuggugugagauuca

SEQ ID NO: 4201122 - RNA, 106 nt, Human
ugggugucagguagaguuuggaugaggcaggauuaagcuaucacccccccugcuguguguuaauuuauugccucagacauuuucauaucugauucauuuucaccca

SEQ ID NO: 4201123 - RNA, 73 nt, Human
ugggugugguccacuuccugcagguaaggagcuuccacaagggcagcucugaaucaucgggaguaaucgccca

SEQ ID NO: 4201124 - RNA, 61 nt, Human
uggguuagaaagcaaucuaccucuuccccuaaaccagaguguggagagugauuuugaugca

SEQ ID NO: 4201125 - RNA, 56 nt, Human
uggguuagcacagugagguauacauggaucaagaugccacugugcacacuaaccca

SEQ ID NO: 4201126 - RNA, 62 nt, Human
uggguuagcgguugauauuuugauuugguuacuguggucauauugugacagcugcuagcuca

SEQ ID NO: 4201127 - RNA, 55 nt, Human
uggguuauaauuuguuaugaaugaagauuuguuuucucauaaaaaugguaaccca

SEQ ID NO: 4201128 - RNA, 74 nt, Human
uggguucccucgaagagcuuauucuuucacuaauccugaaucuucuggugacugauugccugaugggggaaaca

SEQ ID NO: 4201129 - RNA, 72 nt, Human
uggguucuaggcaggcccucuggaaagguagcucaccuaacaaagcuccuccaucucagcaugccagaccca

SEQ ID NO: 4201130 - RNA, 57 nt, Human
uggguucuuucacuucucaguuucaugguagauuuugguccaaaaggaaagaaccua

SEQ ID NO: 4201131 - RNA, 59 nt, Human
uggguugagagcagacuuccagccacaagucuucagggcuacagaagcucuccuaucca

SEQ ID NO: 4201132 - RNA, 91 nt, Human
uggguugggccacuagugacuacagggacucccgcagagauaucaaauauuuccucauggagcucugugcucccucugaaggcucuuuuca

SEQ ID NO: 4201133 - RNA, 76 nt, Human
uggguuggugcaaaacuaguugcgguuucuggcauuuaaagaaugggaaaaccgcaauuacuuuugcgucaaccua

SEQ ID NO: 4201134 - RNA, 66 nt, Human
uggguuucaaaguggacaguuagucucauuguuacauguggugacauugaucauugugaaaucuca

SEQ ID NO: 4201135 - RNA, 63 nt, Human
uggguuucacaugaaaguaggaaaggacucucuggagucuuuaccaucuuuaugugagaaaca

SEQ ID NO: 4201136 - RNA, 55 nt, Human
uggguuuuaaacaugguuaaaguucuuaucccagagcucuaaaccacaaagccca

SEQ ID NO: 4201137 - RNA, 129 nt, Human
ugguaaacauucagggaaaaguuuauuacugacaugugagagcucgguuuucaagguuaauaaaauaaaguugacagaagucgugaugccucacaugacucagacccauuucuccuuuccuucguagca

SEQ ID NO: 4201138 - RNA, 55 nt, Human
ugguaaaugucuaacaaucacuggacaaaagagccauuauuugugauauuuaccg

SEQ ID NO: 4201139 - RNA, 69 nt, Human
ugguaacauaguuggagcaggcauucuccacggacacggagaagcuccgccugcccucugugauggcca

SEQ ID NO: 4201140 - RNA, 83 nt, Human
ugguaaccaucaaaaguaacagcaucuccacuggaaauugguacacaguccacauggaguugcuguuacacuugauaacacca

SEQ ID NO: 4201141 - RNA, 58 nt, Human
ugguaaggacuuaguuaucaauugacagcauaacugguaacauguaaguccuggauca

SEQ ID NO: 4201142 - RNA, 87 nt, Human
ugguaauguucucuucccuggcuggcugucaaggaaagccagagagaucuaucuucggcccucagccagcuggaaugggcacugcca

SEQ ID NO: 4201143 - RNA, 80 nt, Human
ugguaauuggacuuucuaggugcuauugugauuacaaaagacuguaauaugcgaugcuccugagacucuacacgaggcca

SEQ ID NO: 4201144 - RNA, 72 nt, Human
ugguacaaacagcaggaguaucuguaguagcaguagcggcaacugcaggaugugcuccuauugucugugucg

SEQ ID NO: 4201145 - RNA, 60 nt, Human
ugguacagcauuacaacuacuugugagaggagcuccuacaagagcaguaagcuuguccca

SEQ ID NO: 4201146 - RNA, 63 nt, Human
ugguacccuguggccagccagccaaauugaaacugaagugguaauugauaucaugggguauca

SEQ ID NO: 4201147 - RNA, 77 nt, Human
ugguacggauuuucagagacaucuggacuugccuucucugcacagucucagaauguccuugagacauugucguacca

SEQ ID NO: 4201148 - RNA, 55 nt, Human
ugguacugagaauagcgucuacaauucaguaggugcucaaguuuacaugugacca

SEQ ID NO: 4201149 - RNA, 102 nt, Human
ugguacuuccgcccucaggugauuuuaucuaauaaaucugauaaguacaguagacucugauacucggauauuagaugaauagcucaugcuguggggagacca

SEQ ID NO: 4201150 - RNA, 82 nt, Human
ugguacuuggagagugguuaucccuguccuguucguuuugcucaugucgaaucguacagggucauccacuuuuucaguauca

SEQ ID NO: 4201151 - RNA, 102 nt, Human
ugguagauuccuucuagugacuggucaccuucaggucugauuaccaaugcuagaaagcguggcuccuaacagaucugaaauuggucacuuaggauucuagca

SEQ ID NO: 4201152 - RNA, 61 nt, Human
ugguagccacuggggaagccagaucuaggcauguggccugauggcuccugcgguggaacca

SEQ ID NO: 4201153 - RNA, 62 nt, Human
ugguagcccagaggccagaagaggggcucuguuccuuucucuuguuuccuuugcgcuaucca

SEQ ID NO: 4201154 - RNA, 87 nt, Human
ugguagcucuuucuuucaaaucagucuauguuuccaggaaguagaaaauacugcuugcuggaggcagacagaaugcaagugagccca

SEQ ID NO: 4201155 - RNA, 59 nt, Human
ugguagcuuuguucuccuaaccccgagauuucuuggcuaugagaacugacagagugcca

SEQ ID NO: 4201156 - RNA, 75 nt, Human
ugguaggagacucagauggggggaugaaggaguccaaggcccagccucaccccuccauucucucaugucucgcca

SEQ ID NO: 4201157 - RNA, 72 nt, Human
ugguaggugcuggagucugggcaggauuugucugugucugcaucccauccucccaacuuuuccaucucaccg

SEQ ID NO: 4201158 - RNA, 75 nt, Human
ugagcaauuaacaaauguagcugugauagcuucugcccagaagucaaguccauaauuauuugcuuacuugucuca

SEQ ID NO: 4201159 - RNA, 92 nt, Human
ugagcacagcacagaguugcagagagcgucccuuaaaucaaugcaggcgaacagauuagcuacgcaucggccugccucgugcgcugugcuca

SEQ ID NO: 4201160 - RNA, 85 nt, Human
ugagcacagugccagcucugcagggccuggggucacugagaacucaaccgauccucugaccgcugcagggagucacuggugcuca

SEQ ID NO: 4201161 - RNA, 75 nt, Human
ugagcagcuggccuccggcagggccaggacugaagagaugucugaaguuaaaugcuggaagguccaauuugcuca

SEQ ID NO: 4201162 - RNA, 59 nt, Human
ugagcagcuuguuccgaguguuauuugguuccaaacccaauacuauuuucaacugcuua

SEQ ID NO: 4201163 - RNA, 67 nt, Human
ugagcaggaagagagugauucccucccauagaacuguauuuugaagaaggaguagcucuauugcuua

SEQ ID NO: 4201164 - RNA, 76 nt, Human
ugagcaggacugaccggccuuagaacgccgccgcccagaggucagaguugaggugggggccgguggggccugcuua

SEQ ID NO: 4201165 - RNA, 72 nt, Human
ugagcaggcaauggauauaaaagagauaagaacagaugaaccaaucucaguguuaucuaucugccuucuaca

SEQ ID NO: 4201166 - RNA, 68 nt, Human
ugagcaggggagagcgaauguguguccacuuacaugucuguguuugcauguuccuccucuucaguuca

SEQ ID NO: 4201167 - RNA, 83 nt, Human
ugagcaguaaugacugaggugugagccacuuccccaggauuaauaaagagccggggaguugacaguuuagaccauuaggcuua

SEQ ID NO: 4201168 - RNA, 63 nt, Human
ugagcagugaugcguuuuguuucaaaagagaaucaccaacagaaagggauugcucauugcuca

SEQ ID NO: 4201169 - RNA, 82 nt, Human
ugagcauaacaguccacaggggcccacgagccgcuucugcgucccaagcccucguuucugcauccugucuucacucugcuca

SEQ ID NO: 4201170 - RNA, 58 nt, Human
ugagcauggugggugcagagcaggcagggcacugucagcgucugcugcguauauguca

SEQ ID NO: 4201171 - RNA, 61 nt, Human
ugagccaagacggggacccucaccagacaucaaaucuacuagugcuuugcucuuggacuca

SEQ ID NO: 4201172 - RNA, 59 nt, Human
ugagccaagauugugucccugcacucaaguaugggugacagagugacacucuugucuca

SEQ ID NO: 4201173 - RNA, 61 nt, Human
ugagccacaucugcuccagcaguggaccccacccacugcacaggugagauguggggccuca

SEQ ID NO: 4201174 - RNA, 83 nt, Human
ugagcccuaagaacuaguaggauugagaggauuaggguaaagaggguaaaccuacuccaugguuucagucuggcuggagcuca

SEQ ID NO: 4201175 - RNA, 63 nt, Human
ugagccuaggccuugcuaugaagcaguguccaaauggaaaauguugaaugaaugucuggcuca

SEQ ID NO: 4201176 - RNA, 63 nt, Human
ugagccuggagcccagauguuuucucugggaagaggagcaaauguuauuggcugcaaggcuca

SEQ ID NO: 4201177 - RNA, 68 nt, Human
ugagccuuagcaucuuaaagcugugauugaucuugauucucacccacauuucuuauggauguuggcca

SEQ ID NO: 4201178 - RNA, 61 nt, Human
ugagcgcaggaaaggccuuuugaaguggggacaguuuuaagaggcagcauuccucgccuca

SEQ ID NO: 4201179 - RNA, 57 nt, Human
ugagcggagccgcggccguccuggcauuuuaaaggcgaggcagcuggacgcuguuca

SEQ ID NO: 4201180 - RNA, 106 nt, Human
ugagcuaagaggcuagugaaaucuuuagucaggcguggguauuggaaauacuucuuuucugguccuguguacuccugauacuugggauucauuugcucaucucuca

SEQ ID NO: 4201181 - RNA, 65 nt, Human
ugagcuacuaaaugcauuuguauuuuugcagcauauacugucuuguauuuugcaauuaugguuca

SEQ ID NO: 4201182 - RNA, 85 nt, Human
ugagcuagaaauaauauagaauuuauuagaacuacugaaugcccucaguacuuuuuugauaucugaguuucgacuugauagcuca

SEQ ID NO: 4201183 - RNA, 71 nt, Human
ugagcuaggguuagagaugucuccugcacauuacuuagcaauagaaaguguucuacacuuugaccuugucg

SEQ ID NO: 4201184 - RNA, 69 nt, Human
ugagcuauuguugaaguuuuauagggcgaauucauuccauuuacuacuauaaagucuuaaugagucuca

SEQ ID NO: 4201185 - RNA, 60 nt, Human
ugagcuccggcauauggaauuagcaugauagaaccaugacaugccaagugccgggagcca

SEQ ID NO: 4201186 - RNA, 117 nt, Human
uguaaccacuguccuuaacgaguacauagauuuguuuccuucucuccaggagcaugagauuuguugccuccaggaaaggcaacaaaucuacguauuccuuaaggacagugguucuca

SEQ ID NO: 4201187 - RNA, 59 nt, Human
uguaaccuuacauggcagaaaaggaaaauagcuuucaugguuucuguuagaaggauaca

SEQ ID NO: 4201188 - RNA, 64 nt, Human
uguaacuggaagccagccacacccguucuguauguuguguugucuguggcugcuuccagguaca

SEQ ID NO: 4201189 - RNA, 128 nt, Human
uguaacuggucacagcaauguuuucuagacuagugagugugugcucauacagcaccauguguguucaacaacacacaaaguuggaugacaaaaucacuuuagugagaaggcagcuauuuccaggggca

SEQ ID NO: 4201190 - RNA, 57 nt, Human
uguaagccuucccugagaaagucugagauugacauccuccucugggagaggcauaca

SEQ ID NO: 4201191 - RNA, 78 nt, Human
uguaaggcuaguaucaucuacuuuugaaaacauaauuuuuaugauuagcagguaaagguagcaugaaacugcaauaca

SEQ ID NO: 4201192 - RNA, 69 nt, Human
uguaaguggcaaagcaagauucagauguagguugaucccauucuaaaaccuuugcuuuuucuacuugca

SEQ ID NO: 4201193 - RNA, 61 nt, Human
uguaauauauauaaggagcuuuaagggacuuuuuccucgaaaugcucucuaauguaauaca

SEQ ID NO: 4201194 - RNA, 129 nt, Human
uguaauaucaaaacuaaaauggaaauuuuucaucuguaguuuuuccaagguugugugggguuagaugugauaacauggugcaccaaggugaaguggcagaugagagagacagagaauacaaugacugca

SEQ ID NO: 4201195 - RNA, 128 nt, Human
uguaauccagcuagugguucguagguauggcuccccuacugcauggggaaccuuggacuguaucuuucucauuucugucucccugauguagagcaggccugccucaauggauacuaguugaaugaaca

SEQ ID NO: 4201196 - RNA, 56 nt, Human
uguaauucuaaccacauagguguaacaggaagccacugaugcuggucugaauugca

SEQ ID NO: 4201197 - RNA, 56 nt, Human
uguaauugagcauccagaguauggagaaguaauucagccucagggugaccaaugca

SEQ ID NO: 4201198 - RNA, 98 nt, Human
uguaauuuacucugcauccccaggaagaaauucugauuugccugaaucacaguguaaguaggcauguuucuauuuugguacuuguaaguaguauuaua

SEQ ID NO: 4201199 - RNA, 68 nt, Human
uguaauuuauugucaaaaacaggacacuuuggagaacuaaaguggacguuggugauaauuaagcugca

SEQ ID NO: 4201200 - RNA, 123 nt, Human
uguaauuucuucagaagcgguaguuuugagguaucugucuuuaauugugggauccuguaggugcagacaguaugguucugguaauuuaaggcaccucagagcaucaccuuuugcugaucugca

SEQ ID NO: 4201201 - RNA, 65 nt, Human
uguacaauauauaugauuuugaguacuaauauuacacagugaauucagaauuguguguuuguaua

SEQ ID NO: 4201202 - RNA, 69 nt, Human
uguacagacuauuuugugauaacuaaucuguucucuuugacuauuacugaggcaaaguaguuuugugca

SEQ ID NO: 4201203 - RNA, 57 nt, Human
uguacagacuuugcagugugcagagucaaaucucucauauccuguaacuuugcugca

SEQ ID NO: 4201204 - RNA, 77 nt, Human
uguacagcccaagucucugaggcaaaauccggaagauaagcgugucuucuguuaccacagcgaugaggugcugggca

SEQ ID NO: 4201205 - RNA, 61 nt, Human
uguacaggagaacaaugagaaaugguuaccaaugacaaacuuaucagguguuuucuguaua

SEQ ID NO: 4201206 - RNA, 75 nt, Human
uguacagggcaugugcagacacauaugugcacacuaugucgcacacauucaaaugugccugcacaugucuuugca

SEQ ID NO: 4201207 - RNA, 62 nt, Human
uguacaguaggaacuuguuauucauuuguuucuccaaauauuuauugaguaccuacuguaua

SEQ ID NO: 4201208 - RNA, 77 nt, Human
uguacaguaugugaucuuacugaauauuguaggcaguuauaacacaaugguuacacaguauaugggaucacaguaua

SEQ ID NO: 4201209 - RNA, 90 nt, Human
uguacaugcugcaccuuuucucuagcaggugccuuguaacaguuagaugccuauguggccgcaccugcagaggugaggugcuugggugca

SEQ ID NO: 4201210 - RNA, 58 nt, Human
uguacaugugucuguauaucuuuggagaggcuuacaugauuauggagaaauauguaca

SEQ ID NO: 4201211 - RNA, 113 nt, Human
uguacauugccaaaacucugggagaaaucaugggaaauggaaugagggggcugacugcagcugccugugcacuuucucguaauuuccauguuucuaguagcuuggcagguaca

SEQ ID NO: 4201212 - RNA, 103 nt, Human
uguaccuagaaucuuuucaagggcuugaggucccucugucuuaguaauuagacaaauucuguagccaguuuggccucacccugacaaagauuuucuaucuaua

SEQ ID NO: 4201213 - RNA, 55 nt, Human
uguaccuagcaugugcuuuuccucuagcagugggaggaaguggcacaggagugca

SEQ ID NO: 4201214 - RNA, 82 nt, Human
uguaccuguccucaccugcuaccaguuguuuuaugagauaauaaauguauuaaguaaagcagguaguugggacacagcuaua

SEQ ID NO: 4201215 - RNA, 79 nt, Human
uguacucauuugcguguguguguguguguguguguauacucaguugugugcaguuuuaucacauauauagguuuguaua

SEQ ID NO: 4201216 - RNA, 68 nt, Human
uguacugccuguuuucugauagauuuuuucuacaaagauuuguauuaccaggaaauaaugcuaguaua

SEQ ID NO: 4201217 - RNA, 55 nt, Human
uguacugcuugugaauaugaauuuaaauguuauguccagggcacacagcagugca

SEQ ID NO: 4201218 - RNA, 73 nt, Human
uguacuguguagucuagugagucuccccuguuauuuugggaaccauuccacagaagcucaagagagcagugca

SEQ ID NO: 4201219 - RNA, 67 nt, Human
uguacuuacaaacauccaggagagucugagagagaucuagugacaccguggaguugugcugaguaug

SEQ ID NO: 4201220 - RNA, 60 nt, Human
uguacuucuggugacuuuauagaucaaauaacauuuugaauaaaguuuuacaggaaugca

SEQ ID NO: 4201221 - RNA, 105 nt, Human
uguacuuuguguucucugauugcugaagcauacuuucuauacugcuauaguccuuuaguauaugcuucuguaugucucacagcuguucaugaauucaaaguaaca

SEQ ID NO: 4201222 - RNA, 75 nt, Human
uguagagugcuuuucagaaagaugagaaauuacuugagccagugagguguuuucucuugaaaagcaguccucuca

SEQ ID NO: 4201223 - RNA, 77 nt, Human
uguagauaauaguguuacccuucuuaaaguccaagccaacuggagcccugcauagaagggaacacuuucuaacuaua

SEQ ID NO: 4201224 - RNA, 57 nt, Human
uguagaugacauguaaaugaaugaacauaguucuguuccaauaaaauguuauuugca

SEQ ID NO: 4201225 - RNA, 71 nt, Human
uguagauguccuguggugugucucacaaaugcacaugcacaugcaugcgaacacacacacaaacacgcaca

SEQ ID NO: 4201226 - RNA, 80 nt, Human
uguagcagagagcacauaggauacuuuauggaaaagagaaaaaagcacuuucugagaagucuuauugugccucuuauaca

SEQ ID NO: 4201227 - RNA, 81 nt, Human
uguagcguugagaaaguuauaucaucucauugacgaggaaaccaguguccagaaagguaauaugacauccucaaggcagca

SEQ ID NO: 4201228 - RNA, 70 nt, Human
uguagcugguccugcagaagaguccagcucauuugaaagaaugaucuggggacauucucugccuaguuca

SEQ ID NO: 4201229 - RNA, 75 nt, Human
uguagcuuaaguaauaaauaaguuuucgcugucccaagcucuugagauuuuaggcuuguuuuacuaaaagcaaca

SEQ ID NO: 4201230 - RNA, 66 nt, Human
uguagcuucuccuuucauucccuguagaaucugucuuguucucauggagucaggagcagaaauaca

SEQ ID NO: 4201231 - RNA, 91 nt, Human
uguaggaagauguuuaagaucuugucauuucuaauucucucccaagugaggaaggaagugaccaggauaucccuaacauuuggauccugca

SEQ ID NO: 4201232 - RNA, 57 nt, Human
ugguuggagcuccauguccccgggccuguaaggaauuagugcccucagcuuuaacca

SEQ ID NO: 4201233 - RNA, 84 nt, Human
ugguugggaaauuucccuuaaagcaaguuggaaaauuuggaaauuauaucaccacuugaaaaucagaggaaauuuucccaagca

SEQ ID NO: 4201234 - RNA, 61 nt, Human
ugguuguauguuucaguguuugacuggcuaaauaccaaguaaaugcuccauacauacacca

SEQ ID NO: 4201235 - RNA, 78 nt, Human
ugguuguuggcugaccugaucaugccuuucucuuuuuuaaaggcuuauagagaaauguacaaaagucagccaacucca

SEQ ID NO: 4201236 - RNA, 65 nt, Human
ugguuuaccuggaaaagcgcauuauaacacagccuuggaaauuuuguguucuucuaggucagcua

SEQ ID NO: 4201237 - RNA, 80 nt, Human
ugguuuauguuucaucaguaagguuuugguauucauuuucaggagcuucagaaaaguuugaugagcuauuauauaagcca

SEQ ID NO: 4201238 - RNA, 87 nt, Human
ugguuucagcugcacaaggugucauccaggauggugggauuuauuucaccccuaauugcgccauggcagccagcuuuauagaaacua

SEQ ID NO: 4201239 - RNA, 101 nt, Human
ugguuuccaucugcgcagccauuucaacaaccggcugcugucaccccagcuccaaaacagcagcgaggugaugaaauagcuuugucaaggugagaaaacua

SEQ ID NO: 4201240 - RNA, 92 nt, Human
ugguuucgacuaagauaggagggguggaaauagcaaaaugguagugcuugcauguugauuuuucucuccacuccauuaaaucuagggaacca

SEQ ID NO: 4201241 - RNA, 64 nt, Human
ugguuucugcuuauucaaaugaucuuuccaauuuugauugagaggauuuugagaagcaaaacua

SEQ ID NO: 4201242 - RNA, 82 nt, Human
ugguuugagaagacucuuggucauuggcauuaagugauauauggcuuuucaugcacaaaugagcaaggaaaauuucaaacua

SEQ ID NO: 4201243 - RNA, 61 nt, Human
ugguuugcggcuaucacacagccagcuggaguucacucuggugcucagugaugccagacca

SEQ ID NO: 4201244 - RNA, 80 nt, Human
uggcaagaguacauuaggaaauuccaccuguauucugaauguagcagaauucuaggguaaauauccuaugcacucugcca

SEQ ID NO: 4201245 - RNA, 64 nt, Human
uggcaagcagagucugguggggggccuuaaacaaagcucacccagcaugucuucugccuugcca

SEQ ID NO: 4201246 - RNA, 63 nt, Human
uggcaagccgcuggcucccagaaauguuuugguucccccucagcucugggaagccgggcucca

SEQ ID NO: 4201247 - RNA, 96 nt, Human
uggcaagucuauuaauagcuccuagaacagaguuccagugaucauugugugaugaacacugaaggucuuuuucaaaagcuuugaagguucuuguca

SEQ ID NO: 4201248 - RNA, 127 nt, Human
uggcaaguggauaaguaauguugacuuagaguucauuuuucccuaaugaguaccuaggggacucagugacagcucuggggagaaaugggaaggaucuuaaauugauggaaaaaacucacauauguca

SEQ ID NO: 4201249 - RNA, 100 nt, Human
uggcaaugugcauuauguguuuguuaagggguaucaagauguggaagacaucaucugugauucuucuugagucuuggacucuguaaaauccacauuguca

SEQ ID NO: 4201250 - RNA, 79 nt, Human
uggcaauugcuuuugcuaggaacaacaugauagagaauugauuuuuuaaauguguucuuaguagcuaaagcuaccacca

SEQ ID NO: 4201251 - RNA, 69 nt, Human
uggcaauugugaucugggaauucccgagcauuuuccuguauucucuggaguccuguaucacuccugcca

SEQ ID NO: 4201252 - RNA, 55 nt, Human
uggcacagacugggccaaggaaacuccacaugaaucccugguccagguggagcca

SEQ ID NO: 4201253 - RNA, 86 nt, Human
uggcacagcugugaagcaagcacucuaguuagugucuuuuccccucaucuuugcugaccuccggaggcaugcuucaugcugcucca

SEQ ID NO: 4201254 - RNA, 65 nt, Human
uggcacaguacccagggcuaguaaaaagggccugggccuauuauuuauugcuagcccuuggucca

SEQ ID NO: 4201255 - RNA, 74 nt, Human
uggcaccagggugcuguguucuggcaggugcaauauaaauccagcucauucagaggacaagcucccuggugaca

SEQ ID NO: 4201256 - RNA, 56 nt, Human
uggcacguuggauugggaguucgcgucguggaugucucauacguuuccagguguca

SEQ ID NO: 4201257 - RNA, 63 nt, Human
uggcacugcacuuuaagauuuagcucguguuugauucaagauuaaguuuuacaguguuuguca

SEQ ID NO: 4201258 - RNA, 59 nt, Human
uggcacuggaaucguagccuugguugugacccugaucagggaggcaggcuccagggcca

SEQ ID NO: 4201259 - RNA, 64 nt, Human
uggcagaaagugcuuucucuccagcauaaacaauguacucucaagagaagaggacuuucucaca

SEQ ID NO: 4201260 - RNA, 68 nt, Human
uggcagaaauaccuuauuuugaaauagauuguggcaggacauguaacaagaaauaaguuauuucccca

SEQ ID NO: 4201261 - RNA, 79 nt, Human
uggcagaauucucucagaguccccacaucugggucucuucccuuuuggaggcugggauggcggagacugugagcugcga

SEQ ID NO: 4201262 - RNA, 57 nt, Human
uggcagaggaggcucagauugaggaaacaaucccucauggaaugaauucuucuguua

SEQ ID NO: 4201263 - RNA, 87 nt, Human
uggcagagggucaguaagaguagaggaguuaaagagaaauguacuauucccuuuugacccuguuauucucccugaccuagauuguca

SEQ ID NO: 4201264 - RNA, 60 nt, Human
uggcagaggucaaauaccucauuuccaaugccuugaggaaaauggucugugauucuguca

SEQ ID NO: 4201265 - RNA, 60 nt, Human
uggcagagugcggcauccccugucaaccugcugugguuuccuggugggcucacuuugcca

SEQ ID NO: 4201266 - RNA, 58 nt, Human
uggcagaguuauggguauuuauaauuuuauucuuuguagcuuucucaauuuucugcca

SEQ ID NO: 4201267 - RNA, 59 nt, Human
uggcagaguucgcugugccuuugguauagaaaucacaggucacaacaguacuuuagcca

SEQ ID NO: 4201268 - RNA, 67 nt, Human
uggcagcaaccaaccaggcauuuguaccagcucuuccuccacuccacagguccuuugguuguuggca

SEQ ID NO: 4201269 - RNA, 57 nt, Human
uggcagcacggcauccacucucucaauuugauccagagugaaagcauguugcagcca

SEQ ID NO: 4201270 - RNA, 102 nt, Human
uggcagcauggggagaagaaggagacccugaagaugcugaugacaauggugcuugucuacacaaucagcuggcucccucuuaaccucuaccuggugcugcca

SEQ ID NO: 4201271 - RNA, 94 nt, Human
uggcagccuucuucggggcagcugagcagggcaggaccggaggggggccacuggugccugcuuucugggcugccauugugggugggcauagcca

SEQ ID NO: 4201272 - RNA, 60 nt, Human
uggcagcuccucaaaaaauuaaacgugaauacgaaauuauuuaaugggugaggaguuuca

SEQ ID NO: 4201273 - RNA, 76 nt, Human
uggcaggaggcaggugcccugucuguaccgugaugagccguaagaagacugcauagacaaagcgccccuccuccca

SEQ ID NO: 4201274 - RNA, 55 nt, Human
uggcaggucagaauuugaauuugggucuguagaugccacauuuuacuguuugcca

SEQ ID NO: 4201275 - RNA, 83 nt, Human
uggcagugacugcuagcuguccuccaaugcaugcugccccugccacgguauggaaaugucacugugaggcagcugucaugcua

SEQ ID NO: 4201276 - RNA, 130 nt, Human
uggcagugauaacugaaaggggcucaugauuccacaggagcugguuuucuucuccaugacuuuuccaggaccagaaaaagcuguauccugauugggugacagacguccuuggagcuauugcugcagaucg

SEQ ID NO: 4201277 - RNA, 67 nt, Human
uggcaguggcuuugcugguggagaagagggccuuucucuccgcucauuccagaaaggccacucaccg

SEQ ID NO: 4201278 - RNA, 56 nt, Human
uggcaguuuuguauuugagcauuucuuacuggaaauguuaauuacaaaaugugcca

SEQ ID NO: 4201279 - RNA, 72 nt, Human
uggcauaaaacagaaauucuuucuuuaaguguguucaaucugguugcuuaggaaaguuucugcuuaugucca

SEQ ID NO: 4201280 - RNA, 70 nt, Human
uggcauaauuucagucuuauuuuguugauagcuguugagcauuuuguccugcagaauaaguugagaacca

SEQ ID NO: 4201281 - RNA, 77 nt, Human
uggcauagagcaagcccuccguacgugcuagcuuuuaguauuauuuuuagaguggugcacacagcagggcuuugcca

SEQ ID NO: 4201282 - RNA, 91 nt, Human
uggcauagaugaggagcuuaaagcuagcgcugcuuggaaggauuuuuaaaaaucuacagccagucugguuuguagcaucgguuuagggcca

SEQ ID NO: 4201283 - RNA, 80 nt, Human
uggcauauccaguugauguaauacuuugcaaccauuaaauugauguuuacaaggaguuuauauugacauuggugaugcua

SEQ ID NO: 4201284 - RNA, 75 nt, Human
uggcauaugaacacuuuggaauagagauaggcauuccaggugggagucugugucacaggcuaaagugugauacca

SEQ ID NO: 4201285 - RNA, 59 nt, Human
uggcaucucacauaugacaucgccaaugguguguuugcaaccccuugugagaaugucca

SEQ ID NO: 4201286 - RNA, 89 nt, Human
uggcaugacagagggcuccuacaguguuugaguccagaaucagaggggauccgcuggcuuccaugcuguaguggcuuuuauacauucca

SEQ ID NO: 4201287 - RNA, 60 nt, Human
uggcaugauuacuacuaaucaggaagcuaagggcauugauuagacaaaggaaucaugcua

SEQ ID NO: 4201288 - RNA, 69 nt, Human
uggcaugcaggggcuuuuccucuauaaggggcugucacuguccacuguuuaaagccucugcuugagcca

SEQ ID NO: 4201289 - RNA, 66 nt, Human
uggcaugcugagguuucgucugcuugcacuucuacauggugcaagcauggggcacugggaaagcca

SEQ ID NO: 4201290 - RNA, 62 nt, Human
uggcauguacccaggaauggacaaaccuugcccuacgcagcaucauucuugguuggauggca

SEQ ID NO: 4201291 - RNA, 55 nt, Human
uggcauuguggugugugcuuccuagaacaauaggccaucaaaucauguagugcca

SEQ ID NO: 4201292 - RNA, 56 nt, Human
uggccaauggggacuaggguuguauaauuggaaaauacagucuccccuguugucca

SEQ ID NO: 4201293 - RNA, 57 nt, Human
uggccacugggccuacccagauuggcagacagaaggcugccuuucccccaguggcca

SEQ ID NO: 4201294 - RNA, 63 nt, Human
uggccagccauaaaagaacccaaguuucucagcucauaggccagguucuucagugguugucua

SEQ ID NO: 4201295 - RNA, 58 nt, Human
uggccagcccuucagccaugccugauagaaggucgcaggcaggcugaggcaguggcca

SEQ ID NO: 4201296 - RNA, 69 nt, Human
uggccaggcacagugggguccucucuggugggugugagccgcagggaccugccacugcugucucugcca

SEQ ID NO: 4201297 - RNA, 61 nt, Human
uggccaggcagguagaacggcccugcaccccauuuccagggccuucagcaggucuggacca

SEQ ID NO: 4201298 - RNA, 76 nt, Human
uggccaggcaguguuuuucucacagguugcuugacuaauggcugugugccugugccaaaaggcugcuuauggguca

SEQ ID NO: 4201299 - RNA, 62 nt, Human
uggccaguugaagacaaugcucacuuacuacgagauaaugugcguguugucugaagcugcua

SEQ ID NO: 4201300 - RNA, 59 nt, Human
uggccaugaaggaggcagcagaggagaucccaacucugcuacucaccaaucaugagcca

SEQ ID NO: 4201301 - RNA, 68 nt, Human
uggccccacagggccuuuucagaccagcagcccuuuccggccugcacugcccugggccuauggggcca

SEQ ID NO: 4201302 - RNA, 76 nt, Human
uggccccucaaguggaguuacucagggcgcgguccuugggcccuuucucugcccucaguuucacaugagugggcca

SEQ ID NO: 4201303 - RNA, 69 nt, Human
uggcccgaccacaggacaccuuagcuaaaauucagaaacuuuuggauauuguuuugguuccucaggcca

SEQ ID NO: 4201304 - RNA, 70 nt, Human
uggcccugcccccugguggccagagccggcuucacaggacaagagccagcuaaguuccaggggcuuucca

SEQ ID NO: 4201305 - RNA, 55 nt, Human
uggcccugcuaugauccugcaaaggucauccugaucccaggauuagagagggcca

SEQ ID NO: 4201306 - RNA, 63 nt, Human
uggcccuggagagggauauggcauauuaggggugagauaaugcccucccauuccugguaguca

SEQ ID NO: 4201307 - RNA, 69 nt, Human
uggcccuggcacaucuaacucacucuccccacuggcuguggaaaggcagaagucagggugccagggcca

SEQ ID NO: 4201308 - RNA, 59 nt, Human
uggcccuucaaauucccuagucuucauuucagccuggcuagaaggggagauugaagcca

SEQ ID NO: 4201309 - RNA, 77 nt, Human
ugagugucggcugagcaauuuugaugacauugagcaacagcacaacaauguuacaauucaaaaugcugcugauugca

SEQ ID NO: 4201310 - RNA, 61 nt, Human
ugagugucuguggggcauggacaugaccuggauauuaggaugucagcgaucagagaacuca

SEQ ID NO: 4201311 - RNA, 67 nt, Human
ugagugugaccucaucuuaacuggaacccaucugcaaagauccuauuuccaaagaaguucacauuua

SEQ ID NO: 4201312 - RNA, 57 nt, Human
ugagugugcucccuguugcucaggucugagcugagcacaugcacagugcuacacuca

SEQ ID NO: 4201313 - RNA, 62 nt, Human
ugaguguuucuggggaaagagcugccggaggaguggagcuacuucccuguaggaaacacgca

SEQ ID NO: 4201314 - RNA, 83 nt, Human
ugaguguuuggaauccucaguaugaucagggagggcacucagagagaagagcuggaaugaucuaugugaggguuccccauuca

SEQ ID NO: 4201315 - RNA, 69 nt, Human
ugaguuaugcaugagauaaaaauuggcagccauccuugugcucucagcucuugguuaugcaugaaugca

SEQ ID NO: 4201316 - RNA, 95 nt, Human
ugaguuauugcuuucacucuguguuucugcagcucucucugccuguuuuuaccacuggacaggaagcuccaugaaggcagagucaguuugacuua

SEQ ID NO: 4201317 - RNA, 79 nt, Human
ugaguucucauuccuuggcugguauugaacuccaucccaaaaacggggcuuugaggacacacaaagagugagaacauca

SEQ ID NO: 4201318 - RNA, 71 nt, Human
ugaguuguucuaacauuuuaaagucaagggauugaaguuccuggcaguaauuugauguugcugauaacuca

SEQ ID NO: 4201319 - RNA, 55 nt, Human
ugaguuuaugucuuucauuguucuuuguccacaaaggacagugagacauaucuca

SEQ ID NO: 4201320 - RNA, 76 nt, Human
ugaguuuuggaagacaacacaaugcaacagaaggaacacuaauuuugaagcugguagguuuuguuugcagaacuua

SEQ ID NO: 4201321 - RNA, 64 nt, Human
ugauaagaaagcccucacauuuuaggaagaauccuacagugucgugugguuucugcucuuguua

SEQ ID NO: 4201322 - RNA, 85 nt, Human
ugauaagcugugcuuuaaaauuagcuuuaaaccacagcaguccuaaaaugaggauucugugaguucuaguuaauagucagcauca

SEQ ID NO: 4201323 - RNA, 67 nt, Human
ugauaaugggggugccacucagcaugauaaauguucaggaugcuggaggggguaccacucaacauca

SEQ ID NO: 4201324 - RNA, 78 nt, Human
ugauacaugcaauagcaauuuugaacuauaaugaugauagcuuuauugagcauuguucaaagugcuuugcauguauua

SEQ ID NO: 4201325 - RNA, 68 nt, Human
ugauacugaugaaaaccagaacucucauugauaaugcauugucugguuucauuuuccagguaguauca

SEQ ID NO: 4201326 - RNA, 73 nt, Human
ugauacuuggauguuggcagaauuagaaguauggccaguguaacaggacaggaucugccaauauucaaccuca

SEQ ID NO: 4201327 - RNA, 67 nt, Human
ugauagaagguaugugaauuagacaguuggaacagccaaagugucuuuuggagcaucuuucuuguca

SEQ ID NO: 4201328 - RNA, 64 nt, Human
ugauagucuucaucucugccuuggccacauuuuggcccagaugaggcagcgugagggccacuca

SEQ ID NO: 4201329 - RNA, 83 nt, Human
ugauaguuggagcugcagucuaccuggauuuuuauuuaaccaagugaguagauccaagacuguccuauagcuucaaucauuca

SEQ ID NO: 4201330 - RNA, 69 nt, Human
ugauaugcaggcagaacugagaaucacugauguagaagaacaauguuucucaguuuggucugcagacca

SEQ ID NO: 4201331 - RNA, 76 nt, Human
ugauauggagguacugaaaaaauguuugcauuauuuaaagugacaaauguuaauucaguggauaagcaaccuguca

SEQ ID NO: 4201332 - RNA, 129 nt, Human
ugauauuacuaaaguggaggcagcucuaggaguggggacuguagacaucagccuguaguuguugguaccaacuguaauugaaaguuugagucaucuguuuaaagaaugggccuuuccuucaucauguca

SEQ ID NO: 4201333 - RNA, 94 nt, Human
ugauauuccugccucagauuuacugugucuuuccuacuuugugggcaacauguucacagggauggaauagaaauaagaaaaggcuggaauauua

SEQ ID NO: 4201334 - RNA, 93 nt, Human
ugauauucuuugaugacauuuucauguugacagguaguuuugguaaucccaaacaaaguaguuagucaugugaaaaugucauauagccaguca

SEQ ID NO: 4201335 - RNA, 70 nt, Human
ugaucaaagcacacuuagugguagaaccgggucuugaacuucauucuucuaccuccaagugucucuggca

SEQ ID NO: 4201336 - RNA, 71 nt, Human
ugaucaaagcgacugcagguuaaaacaagcaugcagagcacuuucagaaucuugagcagucguugguauca

SEQ ID NO: 4201337 - RNA, 58 nt, Human
ugaucaguagcagaaagcaaugagugucuguacaguuacuuaacuuuguugcuuauca

SEQ ID NO: 4201338 - RNA, 77 nt, Human
ugucucccucagccuggcugggaagagccucucaggggagguguugaccaagcuggucuagaagugugugggaggca

SEQ ID NO: 4201339 - RNA, 56 nt, Human
ugucucguugacccaguuuaucuuccucaggauaaacugugcuggaugaugaggca

SEQ ID NO: 4201340 - RNA, 62 nt, Human
ugucucucuuggagaguccaucaucacugucccaguugagccaugggacuccaagggagcca

SEQ ID NO: 4201341 - RNA, 97 nt, Human
ugucucuguggagcuggauuuugggcauuugaaguuagauuuuuuuaaguuuaauuugauucagcaaauguucacugagcuccugcccugagagaua

SEQ ID NO: 4201342 - RNA, 82 nt, Human
ugucucuuggagcaaccuacucuggcagguuugugccuuggcuggcacaggagguuaggaaguggucgguucccagagcaca

SEQ ID NO: 4201343 - RNA, 68 nt, Human
ugucugaaucucgguuuccucaucuguaaaauugguccagauagauacauaacucgagguuguagaca

SEQ ID NO: 4201344 - RNA, 76 nt, Human
ugucugaauuaguuuccuacuucuaaagugaaauuaguaauaacuaguuucuagacaguaagaauuuaaugagaua

SEQ ID NO: 4201345 - RNA, 57 nt, Human
ugucugauagacugauucauugacauacaaacuuggugauucucugacugucggaca

SEQ ID NO: 4201346 - RNA, 76 nt, Human
ugucugauggaucagaauguuuuggugugcucaccaggggcucuggagaacuagaauguucugauggagucugaca

SEQ ID NO: 4201347 - RNA, 79 nt, Human
ugucugauuuucucauagcuucugucuggaugguuucaaaaaacuaaucauuccacagcuacguuuugagcaucacuca

SEQ ID NO: 4201348 - RNA, 84 nt, Human
ugucugcuaguguauugagcauccacuguaugcaguucccugcgcuuugaguacuuuggauccuuacaauagcacuuuuagaua

SEQ ID NO: 4201349 - RNA, 79 nt, Human
ugucugcuuggguccuggcauggguuuaucauuggagucauuucauucauuguucugccgcugagcccagcugcagaua

SEQ ID NO: 4201350 - RNA, 92 nt, Human
ugucuggcacauagcaaauucuaugucaauguuuauuaaaugaaaauaaaguucuuucagaugaggcaggaguuugcuuguguuucaagaca

SEQ ID NO: 4201351 - RNA, 69 nt, Human
ugucuggcacuaagguuacagaaauggguaaaacaugagcccagucccuguggaacuuagugggagaca

SEQ ID NO: 4201352 - RNA, 71 nt, Human
ugucuggccccagaagggcuguagaucauuugcacucacagauugcuggaugagcucuuggaugccagaca

SEQ ID NO: 4201353 - RNA, 63 nt, Human
ugucugggaguucaugaguucuuaauccucugucacuggaacagacuuagagcaucccaauca

SEQ ID NO: 4201354 - RNA, 72 nt, Human
ugucuggguaagagggaagugaaagagaaccuuagcuucgaguguucaguuugacaaccuuuauauuuuaca

SEQ ID NO: 4201355 - RNA, 70 nt, Human
ugucuggguuuugggucauauuuaguaaagacauuacuuuauguucuuagauaccaagaagacccagaua

SEQ ID NO: 4201356 - RNA, 56 nt, Human
ugucuguaaccauuuucaacaguauaauccagcugucuuugaaugggcuguagaca

SEQ ID NO: 4201357 - RNA, 55 nt, Human
ugucugucaucuguucagugcucaauaaaucuuggccuaaaaaugaugacaugca

SEQ ID NO: 4201358 - RNA, 72 nt, Human
ugucugucaugcccauuuucuucuuugucugaagcaaucucauaccgacaaaguuugugguauuccaagaua

SEQ ID NO: 4201359 - RNA, 129 nt, Human
ugucugucuggagauuugaguuguucuugcuaucucccuuuucucuguuagcaaagucagcaaaugguugaaucaagguagacaaugaaguauuccuguuuguggucuccaguuucuguccuauagaca

SEQ ID NO: 4201360 - RNA, 57 nt, Human
ugucugugcccaaggcucccgggauuagcacaaucagcagguggcuggggacggaca

SEQ ID NO: 4201361 - RNA, 66 nt, Human
ugucugugcuuauguuuccuuauagggaaauaauauuauuugccacaggaaguuaugaguacuaca

SEQ ID NO: 4201362 - RNA, 84 nt, Human
ugucuguuuguuuuguuuucauugucaauaaacuguaucuagaugcugggugaaguucuacagaaaaauuugacauaaaagaca

SEQ ID NO: 4201363 - RNA, 58 nt, Human
ugucuuagugucuugggcuuuuucuucuggccaaaaccagagagugcagacacaagca

SEQ ID NO: 4201364 - RNA, 56 nt, Human
ugucuucaaugcauucucuuguuuaaggaauuaaaggagaaugcauuugaaaagca

SEQ ID NO: 4201365 - RNA, 113 nt, Human
ugucuuccaguuaucugcauugaaugggucuaccuggaaugaugacacacacacacucacacaugugugugcauacacacgguaacacaugguaauguagauuacuagguaca

SEQ ID NO: 4201366 - RNA, 68 nt, Human
ugucuuccaucacuaguccugcagggccugaacuaagccagcugcaucauuggugauucaggaaaaua

SEQ ID NO: 4201367 - RNA, 61 nt, Human
ugucuucugucugucuggcaugugucuuauuugaggguaaaugccagggagacaggaacca

SEQ ID NO: 4201368 - RNA, 74 nt, Human
ugucuucuuccauuguacuauauauguguaaauaaaguaauuugcauguguuucccagcaagcuuaagaagaua

SEQ ID NO: 4201369 - RNA, 66 nt, Human
ugucuucuuugucaucuuagguucauuggcugcggcuccuguagcaaaagauagauuaacaagaca

SEQ ID NO: 4201370 - RNA, 63 nt, Human
ugucuuggguguuuuaaaacuagauucuuuacuagaacuguugcaaaaaaaagcccagugaca

SEQ ID NO: 4201371 - RNA, 59 nt, Human
ugucuuuaagcaaacaguguuuguguaaccaccuuguagcaacauucagcuugaagaua

SEQ ID NO: 4201372 - RNA, 65 nt, Human
ugucuuucauuguuauguuuugcugucugcuuugcagauauaugaaauguaauaaagauacagca

SEQ ID NO: 4201373 - RNA, 68 nt, Human
ugucuuugagcuuuggacuggauuugcuucugagguuaagagaaguguguggcagauguugggaggca

SEQ ID NO: 4201374 - RNA, 81 nt, Human
ugucuuuggggaaugcuugaucugugggcucauuccagaacugggggagccauguuuucagcaugauucuaaccauagaca

SEQ ID NO: 4201375 - RNA, 103 nt, Human
ugucuuuuacaagaaaauuuuaucaaugaugcaccauuauaagaguuuguucaucuaccuuauccugagaaaccuagaugcuguauuauucuaacaugagaca

SEQ ID NO: 4201376 - RNA, 78 nt, Human
ugucuuuuagaucacuaaacugaagcaugaaaaggugaaauaguaccuaaggucagauuucaaguuuaucucagagca

SEQ ID NO: 4201377 - RNA, 123 nt, Human
ugugaaagcauucaguaucaucaucaauuuugcaguauucccuagaagcaguuggugcuguucaguuuucuuacuguuacaucauggcuucaugcugcaauuauacaugaacuagguuucaca

SEQ ID NO: 4201378 - RNA, 55 nt, Human
ugugaaaugcuauuuccaugaguagaagaaaaaugaauggaaaagcauuuuuaca

SEQ ID NO: 4201379 - RNA, 76 nt, Human
ugugaagaaaauaugagauguucucuuucgggucauaaggacucacugaaguaguacauguuuauggagcuucgca

SEQ ID NO: 4201380 - RNA, 76 nt, Human
ugugaagccacacguggcauauaaagauguguucaauuucacauugagcaccuauuaugugucaaguauacgcaca

SEQ ID NO: 4201381 - RNA, 58 nt, Human
ugugaagcgugugcaggggacagcagacaucagagcucuccuguaaaucaccuccgca

SEQ ID NO: 4201382 - RNA, 61 nt, Human
ugugaagguuuuuaugggauaucaaguucucucacuuacauuaucucacuggauuuucaua

SEQ ID NO: 4201383 - RNA, 91 nt, Human
ugugaagugcugcccauuaggaguauaagaggcugcucaccuuugggccagucuucauauucauggugucagguagcucuaccucaucaca

SEQ ID NO: 4201384 - RNA, 79 nt, Human
ugauugucauuccuugaugaauuaaagcuagaguugcccaccuguguuucuugcuagaaucauuuggagagauuuauca

SEQ ID NO: 4201385 - RNA, 129 nt, Human
ugauuuaaacaaucuuucuuaaaaaaauucuuucccugccagcauugucauuagaacauuagcaguaauuaaaaccauaaguagaaguucuagaugacugagcagcugagaaagagcaauuaaacauca

SEQ ID NO: 4201386 - RNA, 129 nt, Human
ugauuuaggcagauuugaaagaaauaucaugcagaaggaaagagaagcagcagaaaaauaggcucuucguuccuuucucuucacugucaugaucaugcucauucauuaaaaggaagauucugaagacca

SEQ ID NO: 4201387 - RNA, 68 nt, Human
ugauuuauuuuugacaaauguaucugcauuaugaauuauauuggggauggaauuguuacauuaaauca

SEQ ID NO: 4201388 - RNA, 61 nt, Human
ugauuucaacauuacacaggcaauucaugguuucuuaagaaagccuaugauguuggaacca

SEQ ID NO: 4201389 - RNA, 102 nt, Human
ugauuucaaguuuauuuccuauggacaaugaaauggccuuucacaaugcuuuaugaaauuacaaaucauuucaguuguucccugguugagaaacuuaaauua

SEQ ID NO: 4201390 - RNA, 103 nt, Human
ugauuucaccgcaguuuguuuggauccaggacuuuauuuuaacggagauucaacaaauggaaauccuucuaaaaagucaguacuauguucuaacgaagaauca

SEQ ID NO: 4201391 - RNA, 64 nt, Human
ugauuucauuugaguuuauaguugcugcucauuauguucagcaucugcuuuauuaaaugaauca

SEQ ID NO: 4201392 - RNA, 61 nt, Human
ugauuucugcguucuaagaaccaacccuuggaugguuucugauucuagaggcaggcuuuca

SEQ ID NO: 4201393 - RNA, 74 nt, Human
ugauuugaucuguuuuccuauuguuuguugaugcuuuuauugacagaauuaaugaaaauuacaagguuaaguca

SEQ ID NO: 4201394 - RNA, 64 nt, Human
ugauuugcaaagucguaucugugacggacccacaggagcguccaguugaggcuuuuucagguca

SEQ ID NO: 4201395 - RNA, 64 nt, Human
ugauuugucuaucucaugugcuguuuucugugacggcagaaacucaugaggucagggcaaucca

SEQ ID NO: 4201396 - RNA, 68 nt, Human
ugauuuuggaggcaauuuuagcuuaacuucuaaaucucuagaauuugaagagugccuuccagacauca

SEQ ID NO: 4201397 - RNA, 56 nt, Human
uggggaaaaugcuuguagucagugaucugugcacacugucaugcaaccauucucca

SEQ ID NO: 4201398 - RNA, 56 nt, Human
uggggaagggcacccuggagacugguggaagcccagcagaugcccugaaauccuca

SEQ ID NO: 4201399 - RNA, 64 nt, Human
uggggacacagagguucguugggagauagauggagguuucuccuuacuaccuaugugucuccca

SEQ ID NO: 4201400 - RNA, 98 nt, Human
uggggagaggcccuugagaauggguugcuuuccacagccuagaacucuagcuuuggucagauaccccauucuuacuccugaagaggucagaaucccua

SEQ ID NO: 4201401 - RNA, 91 nt, Human
uggggagaugguaggguaagaugaggagugagcucuggggaaauaggccaggccagagugguacuucuuuuucuucuccucuuuuucccca

SEQ ID NO: 4201402 - RNA, 116 nt, Human
uggggaggccucaggugugguacugccaagagcagguggcaacucugggagagcccucacagaagaugcuggauguugggccuuggcagauaaggguuaacuggagagccucccca

SEQ ID NO: 4201403 - RNA, 70 nt, Human
uggggaggggcucaggggaaguguccagagccgggaacacaggccuggaagccauugcagccacugacca

SEQ ID NO: 4201404 - RNA, 55 nt, Human
uggggaguguuaggccgcuugcuagucaagcugagaggcugccuaaggcucugca

SEQ ID NO: 4201405 - RNA, 130 nt, Human
uggggaucagacagcugcugugugcguuaguuuucaccuugggaagcgggaaaacagagaaagccaugcuucucaaagaagcauaauggcaaaaguaguuuuaugucauuaccuccccccaaauuacuaa

SEQ ID NO: 4201406 - RNA, 77 nt, Human
uggggaucagcaggccaccugccccagucuuggagcucuguagggugaaugaggcagacguggaagaguuggcccca

SEQ ID NO: 4201407 - RNA, 55 nt, Human
uggggaugaaaggaacauugggcagauaauucuuuccuggcccacucuaucccca

SEQ ID NO: 4201408 - RNA, 57 nt, Human
uggggauggggaugggggcacagagggcacuccaccuggcugcuggcccucucucca

SEQ ID NO: 4201409 - RNA, 75 nt, Human
uggggauuaugagagcauccacuucacaaugauugagaggaucaaguaggaugcuuuauaugaaaguacucucua

SEQ ID NO: 4201410 - RNA, 72 nt, Human
uggggauucuuuaaaacauugcagggaaaauauuggagaucagccaacucaaaacaauguuuuagaucucua

SEQ ID NO: 4201411 - RNA, 78 nt, Human
uggggcaccuucaggggucuagggggcuaggggaccugaagccuaggcccaagccagacccugacccuguaccuccca

SEQ ID NO: 4201412 - RNA, 101 nt, Human
uggggcaggagaauugcuugaacccgggaggcggagguugcggugagcugagaucaugccacugcacuccagccuaggugacagagcaagacucugucuca

SEQ ID NO: 4201413 - RNA, 67 nt, Human
uggggcagugagcucuugucccuaggggaaaucucuuuuccuccacgugacaggagccagugcucca

SEQ ID NO: 4201414 - RNA, 114 nt, Human
uggggcugauaacagcacuuacuuuccaggguuguugugaggaaucagugagcuacuaccuucaaagagcuuagugcuuggcacacaauacacucuuugcuguuauuauuacca

SEQ ID NO: 4201415 - RNA, 75 nt, Human
uggggcugcaggcuguggcaggggagccagaaggaagccuaacucuccccugagcauagacucugucccgcccca

SEQ ID NO: 4201416 - RNA, 62 nt, Human
uggggcuggcuauugucucccuccucucuccugucagagggcaaagcaagcugucagccuca

SEQ ID NO: 4201417 - RNA, 76 nt, Human
uggggcuuauuaagaaaauagcuucucaacagauugugaaaaccagcugaaggcuuguuguuuucuuagugucuca

SEQ ID NO: 4201418 - RNA, 100 nt, Human
uggggcuucaggccagagaaggcuggcuccaaaagcaggggcuagauccccuggcuaugccuuuguaacaggggcccaagagccuuugccaccugcucca

SEQ ID NO: 4201419 - RNA, 61 nt, Human
uggggcuuccagguaggccuaaggcagaccacaguuacaugccacaggacuuggugcccua

SEQ ID NO: 4201420 - RNA, 73 nt, Human
uggggcuuguaguugcuagaaccugauggcuccauccuaaagguuuggaacucaauaauucuucuuaguccca

SEQ ID NO: 4201421 - RNA, 74 nt, Human
uggggcuuguuugugucugaguuguuaguuuccaggggacuuagacuguuacagggcacugaacaucucuccca

SEQ ID NO: 4201422 - RNA, 60 nt, Human
ugggggaaagccuucuuguaucgagccagccucuuuggcuggucacuuggggugccccca

SEQ ID NO: 4201423 - RNA, 85 nt, Human
ugggggaacaagaucggcaagccccacaccgucccuugcaaggugacaggccacugcggcucugugcuggucggcuucaucccca

SEQ ID NO: 4201424 - RNA, 81 nt, Human
ugggggagccagacugucuggguucaaaaccuggcucuacaacuugaccagcugugugaccugaggcaguuacucucgcca

SEQ ID NO: 4201425 - RNA, 77 nt, Human
ugggggccuccugcagguggaugauucucuccaacccuccaauguaagaggcucugccgccucagguaggcccucca

SEQ ID NO: 4201426 - RNA, 105 nt, Human
ugggggcucaggauccagcaaggggcggcaggaguaaaggaggaaggaaugacaggugcaaauaccuucccaccaaagcccuuguugcccucuggcuccucccca

SEQ ID NO: 4201427 - RNA, 77 nt, Human
ugggggcugaggugggagguugcuugagccuaggaugucaaggcuucagugagcugagcucacaccacugcacucca

SEQ ID NO: 4201428 - RNA, 61 nt, Human
ugggggcuuuauaggguagaggaucaguucauauaacuuggcuauacccuguggguccuua

SEQ ID NO: 4201429 - RNA, 69 nt, Human
uggggggccgggccaugagggcagugacugugggugggaccggguggccucacagggccaggccccuca

SEQ ID NO: 4201430 - RNA, 96 nt, Human
uggggggguggcacagcccugcccuggaggucuguguggggccgggggacacagccuugcccugagugguaccuguggguaauagggcccccuuca

SEQ ID NO: 4201431 - RNA, 96 nt, Human
uggggguagggcugagcaaggcauagucuuuaaguucugacucagucaauuuuuuaucgagucauuuuuuaaucugaguuuucagcucuaucaaca

SEQ ID NO: 4201432 - RNA, 83 nt, Human
uggggguaucauaggucccuggaaggccaagcuuggcugucccacagccucugggcaggaccaguggacccagugugccucca

SEQ ID NO: 4201433 - RNA, 94 nt, Human
ugggggucagaggucacuguauccagguuccagcuuguucccuggauguaaugcaggcuggcugacagauuuggggugcugacccucuccccca

SEQ ID NO: 4201434 - RNA, 60 nt, Human
uggggguggaggggcgagagacgcucgggagaccuaggcguccggccucucucgcucccg

SEQ ID NO: 4201435 - RNA, 66 nt, Human
ugggguagaaagcccaagucccccucugugugcagcagggggcuuugcacuugagcuugcuucuca

SEQ ID NO: 4201436 - RNA, 62 nt, Human
ugggguagcaaugacacccagcauaacaguugaucgcugugagcugaggucauuaugccuca

SEQ ID NO: 4201437 - RNA, 61 nt, Human
ugggguagcccacaauggggcgguggcccauuguguggcuucugcuucuggggcuucucca

SEQ ID NO: 4201438 - RNA, 75 nt, Human
ugggguaugcagcuauauugguaauauuugcucaguuuauucauacugaucgcaugcauaauauagauugcccua

SEQ ID NO: 4201439 - RNA, 80 nt, Human
uggggucacuuaagcaagccagugacagccagggaaggaucugacuacuccccaacuucaggcugcuaugagaaucccca

SEQ ID NO: 4201440 - RNA, 130 nt, Human
uggggucuugucuugucacccaagcuggucuuaaacuucugagcucaagcgauccucccacuuggaccuagccaggugcugggauuauggguauuagaguuuaaauuucuuugcucaacaccacucccca

SEQ ID NO: 4201441 - RNA, 59 nt, Human
uggggugaagggaagcguaaaaugcgaccaaggaauuacaugcuauaauuucacccuca

SEQ ID NO: 4201442 - RNA, 77 nt, Human
uggggugaggaugugugauaacagggcaugacgggcagguagaacugcucgcuuguguuuuacacacaggcgcccca

SEQ ID NO: 4201443 - RNA, 57 nt, Human
uggggugcggggccaggaaggaauucuucuuuaaaccuucuugaauacccaacccca

SEQ ID NO: 4201444 - RNA, 58 nt, Human
uggggugggcugaccucauaccugccacauacugggagcccagaguccucccacucca

SEQ ID NO: 4201445 - RNA, 98 nt, Human
ugggguucaaggucaacauguaaaccauugugagcaucagugcaaugcugcacaagauggucaccaguguucuuugcagaaugacaaaucaagcccua

SEQ ID NO: 4201446 - RNA, 68 nt, Human
ugggguugaagaaaggaucuaggaaucugcauaucagacuuugaaccaaucuuccuguuucagcccca

SEQ ID NO: 4201447 - RNA, 81 nt, Human
ugggguugggcucagccaguagaucgggaggauguaggauauugugccaacauagcuucaaucuauuggcuagcaacucua

SEQ ID NO: 4201448 - RNA, 60 nt, Human
uggguaaaaaacugaaguaaguggcaacuagugaaagagccauggcuucuauuuuacuca

SEQ ID NO: 4201449 - RNA, 65 nt, Human
uggguaagguacuguagaucuguaccagccuucaugugaauagcaccucacagugcucuugccua

SEQ ID NO: 4201450 - RNA, 67 nt, Human
uggguacauuugcuucugcuaaacaacuucucauuugauagggcgugggcauaaguaaauagauuca

SEQ ID NO: 4201451 - RNA, 56 nt, Human
uggguacuccuauuaguucagugguucucaaacuugagcugcaucggaaucaccca

SEQ ID NO: 4201452 - RNA, 56 nt, Human
uggguaggaaucgaguguauggcucagacgccauagacuguuacuguucuuacuca

SEQ ID NO: 4201453 - RNA, 68 nt, Human
uggguagggccucaaucacguguuccauguucugcagcuuggugcggauggacgugaugccuuagcca

SEQ ID NO: 4201454 - RNA, 66 nt, Human
uggguagguguggccugaauguugucaguuacccacuucuauaaauaucccagucacaucuaccca

SEQ ID NO: 4201455 - RNA, 57 nt, Human
uggguaugugaggccuuccauauuuuaugagauacaauacugaaccucauaagccca

SEQ ID NO: 4201456 - RNA, 55 nt, Human
uggguauuaggaggaacacaggccucggcugcugagggucugcuuucuaauccca

SEQ ID NO: 4201457 - RNA, 56 nt, Human
uguguuuagagagcacauucagugaguuuucugucugaacauucuuucugaacaua

SEQ ID NO: 4201458 - RNA, 58 nt, Human
uguguuucucugaggggucccuuuaaaggaaugcccuuaaucccccucaggaaguaca

SEQ ID NO: 4201459 - RNA, 84 nt, Human
uguguuucugggccuguguuaguuaugggucucuuguuauaagaagcagagacuccugccaguuaacauaagcaaagaaggaca

SEQ ID NO: 4201460 - RNA, 108 nt, Human
uguguuucuuuuacccagaagaggaaguggagaauaauuucauaguugguguuagccaaaaauuacuuuacacuuucaucuucaauuaaauaugguauuacaaacaca

SEQ ID NO: 4201461 - RNA, 84 nt, Human
uguguuugccaggauucuccacuguaagguuauuauuauuuuuuguuauuaauauuuuauagggagauauuuugguaguaugua

SEQ ID NO: 4201462 - RNA, 65 nt, Human
ugugaggcugguucugaaguacuguacaccccagcagaggugacagccacaguaccagcccucca

SEQ ID NO: 4201463 - RNA, 76 nt, Human
ugugagguccugguggagucucuggggaagugaaagaagcuccuuuaacuugacuccacucacaggacaaagugca

SEQ ID NO: 4201464 - RNA, 56 nt, Human
ugugaguaugcaguguguauacuggaaaauugccaguguuucaccguauguucuca

SEQ ID NO: 4201465 - RNA, 66 nt, Human
ugugagucuaggucaggguguuucaacaugcaaaagcagacccugagcccuugucuguggcucacg

SEQ ID NO: 4201466 - RNA, 68 nt, Human
ugugagugucguguuguacugacauguagcccucagaggcugacauuucagcgugcaugacauguaua

SEQ ID NO: 4201467 - RNA, 64 nt, Human
ugugagugugucugcuuuggcaauaaguggggugauacucacuuuuucaugcaaacgcuucaua

SEQ ID NO: 4201468 - RNA, 75 nt, Human
ugugauaaagcguguugcuagacauggucaagaguuaacuugaaauguucauauuuaguucacgcucaaugcaua

SEQ ID NO: 4201469 - RNA, 75 nt, Human
ugugauaauugcuaauccugccuucuaugucaggucggacagaugugcggggcagcacaguaauuuucaacuuca

SEQ ID NO: 4201470 - RNA, 76 nt, Human
ugugauagacuuaagaauauugaaguuguggagccuaaaaguuaccagcacucuauugaauauucucucucuuaca

SEQ ID NO: 4201471 - RNA, 58 nt, Human
ugugauagaggaaauguugggaggugguguaucugccaccucuguguccugugucaua

SEQ ID NO: 4201472 - RNA, 83 nt, Human
ugugauauuuaaaugcaggucuguuuucaaggucaguuuccggaaacagugacccugagaaggcuuccuccugaguaugcaua

SEQ ID NO: 4201473 - RNA, 66 nt, Human
ugugaucaguguggguaagcaugcugucaaagaugauaucgucacguuuacucaugagacuguaca

SEQ ID NO: 4201474 - RNA, 72 nt, Human
ugugaugggauccagauguggcuccaucccacgaaggcaagugaugaaagcaguaaaugggucccaugcaca

SEQ ID NO: 4201475 - RNA, 73 nt, Human
ugugauuaagggcaugggccuuaagauggaaaagauuauuuugaauuauucacaugggcucauucuaaucaca

SEQ ID NO: 4201476 - RNA, 61 nt, Human
ugugauuagauugagucaaccuugauaauccccccaucucaagaucuuuaguuuaaucaca

SEQ ID NO: 4201477 - RNA, 103 nt, Human
ugugauuuuucuuacgcugcguugaaugcaaggaauuuguuuguuuauuuucauucauuuccuauggauacaggcagauguguaaguugagcuuuaacucaca

SEQ ID NO: 4201478 - RNA, 109 nt, Human
ugugcaaagugauuccugggguuguagcugugugauucccauuauaguccaugaggaucacugacuuuaucaggaaucacacagcuaaacccucauguaacacuucaca

SEQ ID NO: 4201479 - RNA, 68 nt, Human
ugugcaaccugauggcaaguauuuguuuuagaagucauucuaaaaucauucuggugucaguaugagca

SEQ ID NO: 4201480 - RNA, 83 nt, Human
ugugcaaggauaaauaagacagcugucuuucuguuuacaaaggaucuuucaaugguucuagguuagaaggacagauuggcaca

SEQ ID NO: 4201481 - RNA, 72 nt, Human
ugugcaaucaagaggcuaugaggagugagguuuccucuuggauuggccuucuaauuagucuaggaugacaua

SEQ ID NO: 4201482 - RNA, 83 nt, Human
ugugcaauuuacuggguuuccugucuuucucucacacuagaaaguaaucuuucugaguugaggaaaugcauuugccuugcaca

SEQ ID NO: 4201483 - RNA, 63 nt, Human
ugugcacuggcuggacucugaccucuuuugccuguugaaagacaucaccccagccauugucca

SEQ ID NO: 4201484 - RNA, 62 nt, Human
ugugcagcuaucucucuacaguuguacauaaaauguuuuuacuguaaaaugagauauguaua

SEQ ID NO: 4201485 - RNA, 74 nt, Human
ugugcaguaguuaucaucauacuccagaccaauacuucucaucugugucuggguuauuaugauggcuaccaaua

SEQ ID NO: 4201486 - RNA, 80 nt, Human
ugugcagugcuaggcucugcaggacacuuuguugggggugaaauuucaagcagggauacugcagggagggaucugcuaca

SEQ ID NO: 4201487 - RNA, 82 nt, Human
ugugcagugugggcguggcagucaggaaaaggugagaaggagacucacauucacuggauguuacuacccaccagccagcaca

SEQ ID NO: 4201488 - RNA, 80 nt, Human
ugugcauauugcaaaaccauccuaaguaaacagucugugucaucuguauuaaagggaaguuaugcauggauuaguguaua

SEQ ID NO: 4201489 - RNA, 69 nt, Human
ugugcaucuuugugaugaggccuaagacauugucuagcgguauuucuuaacuucucaugcacaugcaca

SEQ ID NO: 4201490 - RNA, 69 nt, Human
ugugcauuagccugugugcugaugacgacagaggcuggagagcuucuguuguacccagguggaugcaca

SEQ ID NO: 4201491 - RNA, 55 nt, Human
ugugcauuugagagauauccaggcacagucccccugggugauucuuauuuguaca

SEQ ID NO: 4201492 - RNA, 80 nt, Human
ugugccaaucuccuaguuuugaucauuguauuauuguuauguaagauauugucauugaggaaaacuaggugaaggacaca

SEQ ID NO: 4201493 - RNA, 125 nt, Human
ugugccaggcgcaugcaaaacuuaucccacuugauccuuacaaaucugugagcuagccaucauuauccccucuuacagaugaggaaacagggucagagggguaaaaugcuaugcccaaagguaca

SEQ ID NO: 4201494 - RNA, 62 nt, Human
ugugcccucagaagaguacaucagccaaaccaagagcuaagacuugcagcuuaugagggcca

SEQ ID NO: 4201495 - RNA, 56 nt, Human
ugugccuggagucccugaggagucagugccccugcuuacauggagcccaggccaca

SEQ ID NO: 4201496 - RNA, 65 nt, Human
ugugccuggccccugguguguuuuaaagcucaaguuucaugccaccccauagguguuaggugaca

SEQ ID NO: 4201497 - RNA, 58 nt, Human
ugugccuguucccacuuugccuucuaccacgauuguaaagcuuccugggccaggcgca

SEQ ID NO: 4201498 - RNA, 106 nt, Human
ugugccuuaguuuuuccaucuguaaaauguuguuaguuuuggcauuuaccucauaggguuggugugagaagggaauguaaagcaaauggaaauaguagcuggcaua

SEQ ID NO: 4201499 - RNA, 82 nt, Human
ugugcgaagucugugaucauucuugauuuaagucggcagaguucgauuugauaaacacuaacugaacacucacugugcaaca

SEQ ID NO: 4201500 - RNA, 88 nt, Human
ugugcuaauuacugguaauaagaucuguuacaugggccuuuacauagguuaugcaaagaaauagacuaaugaaaugaguaauagcaca

SEQ ID NO: 4201501 - RNA, 75 nt, Human
ugugcuccuggcucucugagggcuggagcuguucuauuuccauuugcuucugccccaccucugccaggaugccca

SEQ ID NO: 4201502 - RNA, 69 nt, Human
ugugcucuuagaacauacuuagugugauuucaguucuuuuaaacauacugagauuuguuuuauggucca

SEQ ID NO: 4201503 - RNA, 59 nt, Human
ugugcugcagccaugcuuccgagaugagaauggucacaggaaggcaaugguuuggcaca

SEQ ID NO: 4201504 - RNA, 63 nt, Human
ugugcugcuagacugcuaauggauguuuauuauuauuuaaauguuuuaugucucuagcugcca

SEQ ID NO: 4201505 - RNA, 55 nt, Human
ugugcugcugugaauaagaccuauuuaaguagguuacuuuaucucaugcaccaca

SEQ ID NO: 4201506 - RNA, 66 nt, Human
ugugcuuaugcacacauaugagcaugugugugcccaugcauguguaagugugugugugucugugua

SEQ ID NO: 4201507 - RNA, 68 nt, Human
ugugcuuaugugggagggagagguggugugugucuguucucauaccucuuucugcagccgcaggcaua

SEQ ID NO: 4201508 - RNA, 78 nt, Human
ugugcuuccaaugggcuggcagccugaacagcaucagcaucaugcuguacauucugcacaggcccagcugugggcgca

SEQ ID NO: 4201509 - RNA, 82 nt, Human
ugugcuuuacuuaucuucuauuuccaaucgcaacuagcaccuuuguaguagguguuugcugaagugaagguauguuugcaua

SEQ ID NO: 4201510 - RNA, 60 nt, Human
uguggaaaagaauaagggagauuauuuuaaucuaaguggccucacuuaccuuuuucuaua

SEQ ID NO: 4201511 - RNA, 97 nt, Human
uguggaaaugcaugaguuuggagaguuaauuuuuaguuggauauuacaugugagcaugucccaagauacagcuagagaaacuaccaccauguucaca

SEQ ID NO: 4201512 - RNA, 68 nt, Human
uguggaccagagggaugacauuuggcaccaagaaaguaacccaggugucugucucuuuuucaguccca

SEQ ID NO: 4201513 - RNA, 116 nt, Human
uguggaccucuagaccagccccuucauugacuuaaaggcucugguuacagaaaaggaaaagcugugaccacgacaucuugugaguuaugagaagugucugcauguaugaggccaua

SEQ ID NO: 4201514 - RNA, 70 nt, Human
uguggacgugaccuuauuuggaaauaggguuuuugcagacguaaucaacuuaagaugaggucaugcuaua

SEQ ID NO: 4201515 - RNA, 107 nt, Human
uguggacucccugcugggauggcauccugggccuugcaaagagaaaucuaauaaaauuggugucaggggcucccugggugccaguuccccugcugccugaccccaca

SEQ ID NO: 4201516 - RNA, 69 nt, Human
uguggacuuuguaauagaauuuaagguuaaguaaaguuucugcuuuccuuaggcuguuugcagugccca

SEQ ID NO: 4201517 - RNA, 56 nt, Human
uguggagaaggaacagcgagggaacaccagcccucuacagccuuccuuccuccaca

SEQ ID NO: 4201518 - RNA, 83 nt, Human
uguggagacuuagcucauagaaguugaacuaaaaauauuuuaagaaggaaauaaacugccgauuuuuguugagagauucuaca

SEQ ID NO: 4201519 - RNA, 77 nt, Human
uguggagcuccccaacucagccgaggcuucagcuauaguuggagaagaggccuggccccaguugcuaggagcuccca

SEQ ID NO: 4201520 - RNA, 63 nt, Human
uguggagcucuacagauaucaugugguuuucugcaaaaguuuugaugucuguugaauuucaua

SEQ ID NO: 4201521 - RNA, 59 nt, Human
uguggaggauucugaugccagcucagggacacagaggcuggucagaaugccucccuaca

SEQ ID NO: 4201522 - RNA, 70 nt, Human
uguggagggccuacagaaaugcuuacaagacuugucaugacuuaagcuguucuuuagauauuuuuccaca

SEQ ID NO: 4201523 - RNA, 92 nt, Human
uguggauacccuuccccacacauuuuagagcuccaaguacagcacagugauggcauuucaugcuccuuggaaccugugaggugggugccaca

SEQ ID NO: 4201524 - RNA, 92 nt, Human
uguggauuaaauagaauauaugauuaaaguugauuucaucuauuucuuuuaacuuuaaaaaauaugucuguuagaggauuugaaauuccaca

SEQ ID NO: 4201525 - RNA, 66 nt, Human
uguggauucacuagguugcaaaacuguggacauagcacagacuuguucccuagugagugaaaaaca

SEQ ID NO: 4201526 - RNA, 76 nt, Human
uguggcaaaauugcacaauauagacaugacugcuuauauuuuguugucuuuauuuuaugcuugugcaaaucccaca

SEQ ID NO: 4201527 - RNA, 77 nt, Human
uguggcacuuucagcaggcagacagaauacaaauuaacuugaagcagucggucugcuucugagagcuucuagccaca

SEQ ID NO: 4201528 - RNA, 55 nt, Human
uguggcagaacugggacucaaacuuggagugccuuggguuucauuuucuagccca

SEQ ID NO: 4201529 - RNA, 75 nt, Human
uguggcagcagccugggcagccucacacaauguuuguagacagcaauggacugagagcugccugcaucugccuca

SEQ ID NO: 4201530 - RNA, 63 nt, Human
uguggcauaguaggcugucaaaaaugguagcugcuguuauuaugaugaucaccuauuagccca

SEQ ID NO: 4201531 - RNA, 72 nt, Human
uguggccuuucagcaguuauuccccuacagaugacaaacuccagguuugagggaacagauugcuuggcuacg

SEQ ID NO: 4201532 - RNA, 98 nt, Human
uuaacucccauucauuuccucaaauauuuacuuacugaguguguuuuaaccaccaggcucugaguuagguguuagagagacaagauaaaugagauuag

SEQ ID NO: 4201533 - RNA, 122 nt, Human
uuaacuguagccaucaccacaucacccacaccagcagcggagagucuguucagccaucccuugauucccuucacugagaaaauacacagauuuuucagcuccuguguugucagcacaguuga

SEQ ID NO: 4201534 - RNA, 63 nt, Human
uuaagaaacauuuuuaugacaguuuagcuuuuucagcugcuuucauuauguuguguuuuuuag

SEQ ID NO: 4201535 - RNA, 63 nt, Human
uuaagacaguguauuuguuuucuauggcugcuauaacaaguuaccacaaauguagugucuuaa

SEQ ID NO: 4201536 - RNA, 76 nt, Human
uuaagagaagcacagugaagcauaaggagauugacuuugaaaucggacagucuugcauucacagucuggcucuuga

SEQ ID NO: 4201537 - RNA, 92 nt, Human
uuaagaguucucauugcugugcucacagaacaauguuuaguucuaacuguaguugggcugacaaccaucugacaagcuaggaggauuuuuaa

SEQ ID NO: 4201538 - RNA, 101 nt, Human
uuaagauaggauaauuagaaaaagaauguuaguuucugauacaguaaauuugaggcuguuaauaaggauucacauuuucuuggcaaauuaucuacuuuuaa

SEQ ID NO: 4201539 - RNA, 58 nt, Human
uuaagcaaaugucaguuguuagucaaccaaaaucggaggcaacagauauuuugcuuag

SEQ ID NO: 4201540 - RNA, 96 nt, Human
uuaagcagaagcaauuguaagcuuuaagcacuagcaaaugugaagacgcuuuacaauuugcugugugcuuuagagacucguauugaccauguuuga

SEQ ID NO: 4201541 - RNA, 89 nt, Human
uuaagcauauuauguagaugcacuugcguguuugcaaaucucuucccaacgagggauuugauucuucaagugccugauaagauguuuga

SEQ ID NO: 4201542 - RNA, 82 nt, Human
uuaagccagacuauuaauaucagucagaggauauucagauuaaucaguuuuaguucugcuguaauaucucugcugggcuuga

SEQ ID NO: 4201543 - RNA, 67 nt, Human
uuaagcguuuugagaagcccugcgggaaagaaaacucuuuauuccaguguuucucaaauugauuuga

SEQ ID NO: 4201544 - RNA, 72 nt, Human
uuaagcuuaacuugucagaaaauacaguguccagugacaaacuguagaaauguuuuugacaaauuaauuuga

SEQ ID NO: 4201545 - RNA, 129 nt, Human
uuaaggaaaaugucuucauugcaaaaaggguagugauuauuuuuaguauaggaugacauuuuggaguucauuggaaaucuuucuauuucuaaaaacuacuuuuuuucauugaaaauacuaacccuacga

SEQ ID NO: 4201546 - RNA, 83 nt, Human
uuaaggaaagcaaaugccugggcuccauccucagagagucucauucacugggucaggauagagcccaggaaucuuuaccuuaa

SEQ ID NO: 4201547 - RNA, 66 nt, Human
uuaaggaccaguuucaaacuguaccaaauccucacucacuggcugaugcaguaaauuggucucuaa

SEQ ID NO: 4201548 - RNA, 60 nt, Human
uuaaggcauugauauggugcuaagggaaaaauguauuagcacacuuguacaaugcccuag

SEQ ID NO: 4201549 - RNA, 58 nt, Human
uuaagguauagcuugcauacagaaaaguuaacucuuuucaguguauagcuaauuuuga

SEQ ID NO: 4201550 - RNA, 77 nt, Human
ugccucaguuucaucugcagaaaaacauagagauauuuacuugcucuaauaaauuauugugagguugaaaugaggua

SEQ ID NO: 4201551 - RNA, 67 nt, Human
ugccuccucaggcugccuggaagacucuacacagauauggagaauccuugacucaggcugaggggca

SEQ ID NO: 4201552 - RNA, 61 nt, Human
ugccucuaggagaaagcauaacauuuuagauaauccauuuaaaaugcuucugauagaagca

SEQ ID NO: 4201553 - RNA, 61 nt, Human
ugccucugccagcuucuggugguugccggaaacccuuggcauuccccagcuuguagacgca

SEQ ID NO: 4201554 - RNA, 56 nt, Human
ugccucugcugcauauucaccuggaaaucauccacaugccaagcaccgcagaggca

SEQ ID NO: 4201555 - RNA, 75 nt, Human
ugccucuuccuguccucaccuuggcaggggggaggcuggucccaccuaggcugaguguggacccaggaaguagca

SEQ ID NO: 4201556 - RNA, 64 nt, Human
ugccugacugcugccaccacuaacaaaucaaugggccccuaggguuggagguggugcaggggca

SEQ ID NO: 4201557 - RNA, 76 nt, Human
ugccuggagcugggggcuccucauggggccaugcaaagcgcccuguguggaaggcaggaggcccaagucccaggca

SEQ ID NO: 4201558 - RNA, 65 nt, Human
ugccuggauacucauuaauuuccuauauuuuuaucugccuugaauuauuuucuguguccagugca

SEQ ID NO: 4201559 - RNA, 57 nt, Human
ugccuggcaaugccagaagccaggacuaaucagaccaggcuuccuucuguccgggca

SEQ ID NO: 4201560 - RNA, 59 nt, Human
ugccuggcacauagcaaccccucccucaauaaaggguagcuguuaauauaugccaggua

SEQ ID NO: 4201561 - RNA, 57 nt, Human
ugccuggcccagggcuccgcagggguggauccagcccugggucaccaggcccaggca

SEQ ID NO: 4201562 - RNA, 72 nt, Human
ugccuggccugaagugcagagaguuggucuguuuaacaaagcaggcacgcucccugcgcgaugguccuggca

SEQ ID NO: 4201563 - RNA, 57 nt, Human
ugccuggguccaggccaagccucucaucuccuccaagcaggccaucugccccaggca

SEQ ID NO: 4201564 - RNA, 58 nt, Human
ugccugucuuaauaucuggaaagagauuucuguguccuguccagcagcaaggcaggca

SEQ ID NO: 4201565 - RNA, 56 nt, Human
ugccugucuucaggagugucacagagggccuuguggacauggcugaaaggcuggca

SEQ ID NO: 4201566 - RNA, 66 nt, Human
ugccuuaaaaaugugacagaugcaguacagucauuguagauugccuccagaugaucauauuuugca

SEQ ID NO: 4201567 - RNA, 60 nt, Human
ugccuuagagcacucaagagugagaaaaauucuaaagcauucauucuugggguaaaggua

SEQ ID NO: 4201568 - RNA, 77 nt, Human
ugccuuagggaaggacagugaagaaagauggcuuauagcaaggccucacccuuucuucuacuguucuaaccugugca

SEQ ID NO: 4201569 - RNA, 107 nt, Human
ugccuucuccaaucagugguguggggaaggaacugccauugguucuggaaaauccagucacaugauggggcuggacaugaccuccuucccuuagcaugaagagggua

SEQ ID NO: 4201570 - RNA, 130 nt, Human
ugccuucucuuucuuggccggcugcgucauucacauggcauuugucaagauaaguaccuuguagcuggguauuuagaaugcguguacguguguuguguguguaugugguggagaugaagaaagguuaggg

SEQ ID NO: 4201571 - RNA, 130 nt, Human
ugccuucuggguaagaaaggugauucuuucuuucugugacuuuuuaaaucuucggcuuauucaguuucuaaggugccuaguguuuggaagucauagccuuuggaaucacucauugucuacaggugggaca

SEQ ID NO: 4201572 - RNA, 57 nt, Human
ugccuugagagaaugacucgggagcccucagacucaacggacuuucuucucagggca

SEQ ID NO: 4201573 - RNA, 90 nt, Human
ugccuugcaagggucaucccucacucuguuugugaaacccauagcugcauggcacaggcgguaaggguguggugagaccuuaccagggca

SEQ ID NO: 4201574 - RNA, 55 nt, Human
ugccuuuacugauuagcugugucugccaugggcucagaaagagaaagcagaggca

SEQ ID NO: 4201575 - RNA, 55 nt, Human
ugccuuuccucagggugagugguaggaaaucugguucaggcaguggggaaaggca

SEQ ID NO: 4201576 - RNA, 66 nt, Human
ugccuuugccauauucuguuggguagaaauaaguuauaaguucugcccacacucauggggaaggua

SEQ ID NO: 4201577 - RNA, 63 nt, Human
ugccuuuuacucuaagugaaaugggaagacuuugauaaacauugagcaaaggaguaaaaugca

SEQ ID NO: 4201578 - RNA, 68 nt, Human
ugccuuuucuguagcucuggaauucccaucuguauacauggaaccucuugagugugcagcguaaggca

SEQ ID NO: 4201579 - RNA, 55 nt, Human
ugccuuuuuggagagaugcuauuuacucugauagcugaaagcuugcaacgaggca

SEQ ID NO: 4201580 - RNA, 57 nt, Human
ugcgaugaggccaggacccuccuaaacccuaacagcauccuaacgaggcccauugca

SEQ ID NO: 4201581 - RNA, 90 nt, Human
ugcgauguggcucuggauuauguucgacuuuagaaauagugccagaacuauucuuugauuuguggacauggacccugagacugcagagca

SEQ ID NO: 4201582 - RNA, 97 nt, Human
ugcgcaggcgccgggcgagaggcugcgccugcccuacccuggagcgcgcgugcgcgcgagagccggaaggggcggugccuggcgcggcgccugcgca

SEQ ID NO: 4201583 - RNA, 64 nt, Human
ugcgcauucugagggugggaagggcuaaauauuuacauugcaagaucagaacucagaaugugua

SEQ ID NO: 4201584 - RNA, 59 nt, Human
ugcgcuggcagacacucaaaagcugggagaauauuuucugucaggaaggucuaagugca

SEQ ID NO: 4201585 - RNA, 75 nt, Human
ugcgcuuuaaaagcugcccuguguuagaguucauuuuacagauguacuccuggcaggcagccuguuucggugaca

SEQ ID NO: 4201586 - RNA, 60 nt, Human
ugcggaggggugagccucccauccagcaccaaagcgggcucugagggcuuaucccuccca

SEQ ID NO: 4201587 - RNA, 124 nt, Human
ugcggccacugugagagcacaaggccacccucagccugcagggcugccuguuguggaggcugcauccccagcgccugcagcguugcagagccccaggaaggccccuugaccucucccugcugca

SEQ ID NO: 4201588 - RNA, 79 nt, Human
ugcggccagaagguuccacggccuaccagcgagcccuggcucguccaggaagaucggccgauggugccgagcuggccca

SEQ ID NO: 4201589 - RNA, 62 nt, Human
ugcggcggcgggcagaggacuaccacaaaugcaaaguaaggagcuuccuccccgcaguugca

SEQ ID NO: 4201590 - RNA, 60 nt, Human
ugcggcucagacuucccaagaacaggccaucuucugugggaugggagcucuggagcaacg

SEQ ID NO: 4201591 - RNA, 85 nt, Human
ugcgggaggcccucacacugucuccucuaccugcuucucucuugcucugaagaugccuguagcaggaagaugugagcuucccaca

SEQ ID NO: 4201592 - RNA, 72 nt, Human
ugcgguaaguaggaagcauaaaagucagcuguggaacuugacuuuacagauauguuuccugagcucauugua

SEQ ID NO: 4201593 - RNA, 69 nt, Human
ugcggugggugcgggaggcgcgccuaggugccgaaacccggucugugcugccauccuguggccauugca

SEQ ID NO: 4201594 - RNA, 61 nt, Human
ugcgucugucuucuuccccuuccuggcaauaauaggguguguacaagacaagacaaaugca

SEQ ID NO: 4201595 - RNA, 67 nt, Human
ugcguggcgcagcgugugggaugaaugugcaccguaagagguccagucccacugcggugcccuagca

SEQ ID NO: 4201596 - RNA, 89 nt, Human
ugcuaaaauuuaggacaucaugucacuaacugcuacugauauauuuauugcuuaaucauuagcgcuugggacacauggagugcuuagca

SEQ ID NO: 4201597 - RNA, 85 nt, Human
ugcuaaacacugcuagauugcaagaaauaaucgaauagacuaauuuauucuaguuuaagguuagaucuuuccagggguguuugca

SEQ ID NO: 4201598 - RNA, 92 nt, Human
ugcuaaacuguaguggcacaaauccaagaaucaaagaaguauccuaagccugugguucuuugggauuguagcugucugugguuuuuacagua

SEQ ID NO: 4201599 - RNA, 68 nt, Human
ugcuaacucuccuaaaggacuaucuacagggaccuuuccuauagaaaauccaguguggggagaaggua

SEQ ID NO: 4201600 - RNA, 76 nt, Human
ugcuaaggaagcuacaguuuacccaugguugcagaaaguaaauaugugaguagaugugcaauuuauauucuuagua

SEQ ID NO: 4201601 - RNA, 118 nt, Human
ugcuaaguauucuggaguugcuucugguuuacucugcacugcucaccuccgagggccagauccacaccccugugacagaugcggaaacucagagaagccacccagcuagugaacagca

SEQ ID NO: 4201602 - RNA, 88 nt, Human
ugcuaaucaaauaaagaaaucagguugaaaacuaguggauaccuugcuggguccaguaaauuacuugaugucauuaucuuuugaagua

SEQ ID NO: 4201603 - RNA, 65 nt, Human
ugcuaauggggcuagacaaccagugcccuugagucugaagggagccaguuuguuagcccccugua

SEQ ID NO: 4201604 - RNA, 60 nt, Human
ugcuaauugugccuuaaacugcauaauuuauauaaccauguagaguacagcacaacagca

SEQ ID NO: 4201605 - RNA, 63 nt, Human
ugcuacagagccaggaagagugguaugaagugacauuaagaaccauuuuucuuccucugugca

SEQ ID NO: 4201606 - RNA, 63 nt, Human
uguuuacuuaugugggucacaugguccugcugaccauggaaagagaagacugauaagugaaca

SEQ ID NO: 4201607 - RNA, 61 nt, Human
uguuuacuugagguggaaacaauucucucaucuauguguuguuuauucucuucagugaaca

SEQ ID NO: 4201608 - RNA, 69 nt, Human
uguuuaggaggcuuucccaaguuuuaccaaaaaaggcugguaguuucuggguuggcuucuaccaaaaca

SEQ ID NO: 4201609 - RNA, 126 nt, Human
uguuuaggcugcuuauuuuuucaguuucauaagcuaaguggaagucuuaucaugcccacaauauuuucugggcccugguaacauucccacauaguuuauacuuggauaaaauauuaaaaccaaaua

SEQ ID NO: 4201610 - RNA, 98 nt, Human
uguuuauagaaacgauagcauugcaguuggugucacugauugcccacguuguuacuucaaugaagccagcugggaugcgauugcauggucuuuaaaua

SEQ ID NO: 4201611 - RNA, 75 nt, Human
uguuuaucuuuuaugcuacucaauagucagugccuagcaaagugauuggcucuuaguaaguaucuaugauggaua

SEQ ID NO: 4201612 - RNA, 55 nt, Human
uguuuauuuucaggauggauugaggcuuuuccugcagucucugauauaauaggca

SEQ ID NO: 4201613 - RNA, 85 nt, Human
uguuucacuaaugaguuaauguguugcccuuuauucuguggccuauuucuucucccaguaacaauugacacuucauugugaggca

SEQ ID NO: 4201614 - RNA, 118 nt, Human
uguuucaggacuaaagaguuggcuacaguacaagcaaugcauuuuugaacauugauuugccagaaguguaucuguugucuguugcuccaggcuggcauuuuuaauuauuucugggaca

SEQ ID NO: 4201615 - RNA, 96 nt, Human
uguauacauauuucuuauucuuguuacauacaaauagagcuguaguaucaaauaauuagugaucacuauauagcuauguguauguauguguauaua

SEQ ID NO: 4201616 - RNA, 81 nt, Human
uguauaggaguguagggcuuuuauguuugcaaaaugcuuucacaugcauuaguuaacauauuuggcugauauucccagaca

SEQ ID NO: 4201617 - RNA, 58 nt, Human
uguauaguguggaaagaacaguuggucaggcaaagguuuuuucagccacaccuguuca

SEQ ID NO: 4201618 - RNA, 61 nt, Human
uguauauaagguaaagcgauuguuaacgcguaugugucuauaugugcguuaccuguauaua

SEQ ID NO: 4201619 - RNA, 68 nt, Human
uguauauacacacucccauguucuggguaugugcacacauguccucaugugcugaguguguauauaca

SEQ ID NO: 4201620 - RNA, 102 nt, Human
uguauauagaauacacagggaaaguuugagaagugaaggacugaccccuccaacugccguucugucuauuuuauacucaaaucuucuauauauuaucauaca

SEQ ID NO: 4201621 - RNA, 103 nt, Human
uguauauaugauauauauauauaugcacauacauaugcucuauaaauauaagcucuguguguguguguguguguguguguguguauauuuauacauguauaca

SEQ ID NO: 4201622 - RNA, 129 nt, Human
uguauaugugguuuaugugugugcacacguacaugcauauaugcauauauguguguauaugucuauauguacauacauauguguguauaugcauguacgugugcacaaauguacauacauauauguaca

SEQ ID NO: 4201623 - RNA, 74 nt, Human
uguauauguuuucaacuucauugacuuugcugccuuuccuucucagaggcugagcugguagugaguacuauaua

SEQ ID NO: 4201624 - RNA, 113 nt, Human
uguaucaagacagaaaaugaacuggauaagaguuuuacuuccuagaccuucuggucugaaaugcagggagagaacucugucuuuaugccaguuuauuuaacuuaaaugaaaca

SEQ ID NO: 4201625 - RNA, 83 nt, Human
uguaucccauuaaccuugaccaggcccagaccacaucccaggagcugguuucuggguuugucuaggaccacuagugggaccca

SEQ ID NO: 4201626 - RNA, 82 nt, Human
uguaucccuuaaguaagauuuuuuuccacagacucagacucaaggcugggucagaaucagagaguugcucuuacagggugcg

SEQ ID NO: 4201627 - RNA, 68 nt, Human
uguaucuguaaucccagaucaauacugaaaaugcuuucagggucauucuugggcaugcacagacugca

SEQ ID NO: 4201628 - RNA, 77 nt, Human
uguaucuuauugcuguugccagauaacuuugcuuuuucuuugagucuccaugucuuacaugcaguuuaugagagaca

SEQ ID NO: 4201629 - RNA, 64 nt, Human
uguaucuuucauuggcagagccuguuuuguuuuaaaaucuguucugcagugaauuuaauuuaca

SEQ ID NO: 4201630 - RNA, 94 nt, Human
uguaugcucaugagcuaaugauugaaauaccuguaucugugauaacagcguaauagauacaacuguuuaaacauuaaguccucgugaaaauaga

SEQ ID NO: 4201631 - RNA, 74 nt, Human
uguaugguguuuauuuuucccagaaccagaacauaguagauugucaauaauuuugaagaagugaauaucauaua

SEQ ID NO: 4201632 - RNA, 78 nt, Human
uguaugugugguuuaagaauugaauucuggaaagauaccggaauugcauaaacacauuucuuaugaccugcguauaca

SEQ ID NO: 4201633 - RNA, 56 nt, Human
uguauguguuuuauguguguuuaaauaaauauguuagauacacguguauacauaca

SEQ ID NO: 4201634 - RNA, 84 nt, Human
uguauuaaguuguaguuucuacaagggaagggaucuuaucuguuuaacuugaucaguagagcauucacugcagcauaaugugca

SEQ ID NO: 4201635 - RNA, 58 nt, Human
uguauuaucuaguaacugauaguggcuaauuccugccaugaaguaaauagaaaauaua

SEQ ID NO: 4201636 - RNA, 102 nt, Human
uguauugaauuuagguuucuuugauuuauugcaagagcuguaagguaaccaaaaauguuuaaauuaacagcucugcauuuuggguuaaaaccaaaagaugca

SEQ ID NO: 4201637 - RNA, 65 nt, Human
uguauugcauuguuucaagcuguuaccuagagaaaaucagauuacaguguuuggcaaugcaugca

SEQ ID NO: 4201638 - RNA, 64 nt, Human
uguauuggacuuguguuaacaaggugcuguagcuuucacagcaagagcacaguuuccacaugca

SEQ ID NO: 4201639 - RNA, 77 nt, Human
uguauuuauauuccacaacaaccaagcauauacauauaauuguaugugugugaauguguguguguagaguauuuuua

SEQ ID NO: 4201640 - RNA, 55 nt, Human
uguauuucuuguguucccauccugaucauuaaaggaaaggaauauaugaaguaua

SEQ ID NO: 4201641 - RNA, 55 nt, Human
uguauuugggucacaagaugggaagaaaaauuaucccuucuugggucaaaguaua

SEQ ID NO: 4201642 - RNA, 59 nt, Human
uguauuugugauaacgaccugaauuuuuguagguacagguuacuuaagucagaaauaca

SEQ ID NO: 4201643 - RNA, 85 nt, Human
uguauuuuccaagcucugauaguauuggugauuuauagcauuuuugcuucagauccuaauuugucuuuguuuugaauuuuuuaca

SEQ ID NO: 4201644 - RNA, 83 nt, Human
uguauuuuugugcuugcaacuuuccagauguaucacucuaaaaugccgucugcuguucagagauguugcuaguauuuagagca

SEQ ID NO: 4201645 - RNA, 95 nt, Human
uguauuuuugugugaauuguauguggaaucaaauauguauguuuuucguagaacauguguggacaugaaucuacaugagcaugcaagugaauaua

SEQ ID NO: 4201646 - RNA, 71 nt, Human
ugucaaacauagggacuuuguggucacucuguauaucacagauugcucuuauaauaguccuuauguuagca

SEQ ID NO: 4201647 - RNA, 109 nt, Human
ugucaacuuuauggauguacauuaccuguguucaaugacuucaucuuuccuuuuaaggaaagaucauugucuuguagcaacgaggugagaaagucaggaaagcuugaca

SEQ ID NO: 4201648 - RNA, 74 nt, Human
ugucaagucgaaggcuuuuuggguaauuguagguccugucuucuacuuuuucccaagagcuuuaaaacuguaca

SEQ ID NO: 4201649 - RNA, 64 nt, Human
ugucaagucucugaaugaaaugcacuuuuuucaacggaagacuuuuuucuucagagacauugca

SEQ ID NO: 4201650 - RNA, 61 nt, Human
ugucaaucauaaugaagugaagaaccccauaacugguucauucucuauuguguauugcaca

SEQ ID NO: 4201651 - RNA, 58 nt, Human
ugucaauguacguuuaucaguugucacaaauuugauacucuggugaggguuauugaua

SEQ ID NO: 4201652 - RNA, 65 nt, Human
ugucaauuaaggagcaauugcaaugaugaaaagcauaaggcaauggcauucuugacaagcugaca

SEQ ID NO: 4201653 - RNA, 66 nt, Human
ugucacaauguaggcugaaaaagcuuugugaacguuccacaaagcaucaacacuauauugaugaca

SEQ ID NO: 4201654 - RNA, 55 nt, Human
ugucacagagcgugcaacagaagggccucuccccaagaugcaugcgucugugaua

SEQ ID NO: 4201655 - RNA, 74 nt, Human
ugucacagucgucuuccaugggugcugugcucuaaccagggcugcaaggcauugaugggagaugguggauggca

SEQ ID NO: 4201656 - RNA, 63 nt, Human
ugucaccaugcagguuauaugugcuucuguuuucauugcuggaagagaaccugcaagguggug

SEQ ID NO: 4201657 - RNA, 65 nt, Human
ugucaccuuacagucagauaagcacagaaaaauaagcagaugcuaaucuguuucccaaggugaua

SEQ ID NO: 4201658 - RNA, 62 nt, Human
ugucacugcaauguuguuuacagacuguaauggguuuauuaagaacauuuuguagaaugaca

SEQ ID NO: 4201659 - RNA, 93 nt, Human
ugucacuugccucauccaaucugcugacuuuagaacccaaaaaguuucuuugguaugggcuuuuggagcugaauuacaguggagggcaugaug

SEQ ID NO: 4201660 - RNA, 64 nt, Human
ugucacuuugccuucuggacuuuggagucuuuccaggaagaaauaaguuuaggggaaagugaca

SEQ ID NO: 4201661 - RNA, 65 nt, Human
ugucagacucuccagauuugggaauaauguuguucugugacgacaguucucugauggguuuaaca

SEQ ID NO: 4201662 - RNA, 60 nt, Human
ugucagaugugucuccaagugccuccagaacauggacugcagcugcaagcacuucuggca

SEQ ID NO: 4201663 - RNA, 68 nt, Human
ugucagccugagggaucuguggaauagccuacccaagagcucauagaaacccuucagaaaucaugaca

SEQ ID NO: 4201664 - RNA, 57 nt, Human
ugucaggcaggucauuaagcauuuuauauacaauugauucuuuugauaagcuugaca

SEQ ID NO: 4201665 - RNA, 55 nt, Human
ugucagggcaaagucuucuagaacccaaccugguaacugcaccuuuggccugaua

SEQ ID NO: 4201666 - RNA, 59 nt, Human
ugucagugagggaggcagaauguguggugugaaguggauucugccuccaggagcuggca

SEQ ID NO: 4201667 - RNA, 57 nt, Human
ugucaguguuuuaugugcccuuccagaauuaaaaaagugcauauacaaauacugaua

SEQ ID NO: 4201668 - RNA, 78 nt, Human
ugucaguuacacccagagauguccugagugauacagagaauuucugucagucauucacucacucggacaagaaagaca

SEQ ID NO: 4201669 - RNA, 57 nt, Human
ugucaguucugguuggcucccacuugaaccuaggucucaacgacacagagccugaca

SEQ ID NO: 4201670 - RNA, 65 nt, Human
ugucaucagcucuucauucuugauuuuugguuauauguuaaugaggacacuagagcaggugcaca

SEQ ID NO: 4201671 - RNA, 81 nt, Human
ugucauccccuaaggcaaguguuggucugagaagcgaaaccaagcuggcacagcacuguaggccugggagggaaagugaca

SEQ ID NO: 4201672 - RNA, 77 nt, Human
ugucaugcuguguuugagaaccuaggauaucccagaaaaacuuuaggaagcuugggucucaaauauuguaucuuaca

SEQ ID NO: 4201673 - RNA, 109 nt, Human
ugucauuggaguaaugcuaggcucuguauacugaucaaacugagguucauaguuauuuuuaauauuucagcaaugacagccuauauaauaaucuagcuaucuguagaca

SEQ ID NO: 4201674 - RNA, 56 nt, Human
ugucauuuaaagcuuuccagauuugaagaauguguggaaggccagaaagaaugaca

SEQ ID NO: 4201675 - RNA, 67 nt, Human
ugucauuuaggcaaugcucucaaauuugguauaaucuuacuuaggccugaagcuuugccuagaaaca

SEQ ID NO: 4201676 - RNA, 117 nt, Human
uguccacugcuuuuagggaagaggccuuggcaaguggaaugcucuuccucccuuggacuugauagggaggaggaauguuuuguguagcaacuucccucucucccuuuggggugggca

SEQ ID NO: 4201677 - RNA, 65 nt, Human
uguccacuuugauaauagaagcacuggaacaaguauaucccaguguuccuucacagcaguggaca

SEQ ID NO: 4201678 - RNA, 83 nt, Human
uguccagaggggcccguagccagugggacggugcugcacguggucgugccucaagcccuccacugcaccgggcgcccuggcca

SEQ ID NO: 4201679 - RNA, 72 nt, Human
uguccagauacuguuaauguuaaauucagggagaagcucccuaaagucauguaacaguuuaaucauuggaca

SEQ ID NO: 4201680 - RNA, 62 nt, Human
ugucccccuuuggcuuuuguuacuaacuuuaaugaccacaacauuuaggccaaaaaggggca

SEQ ID NO: 4201681 - RNA, 61 nt, Human
ugucccugcaucugcaggccaugucaaaggacgcccugaaucuggcgcagaugcaggagca

SEQ ID NO: 4201682 - RNA, 93 nt, Human
ugucccugcuuuuauuuaaaagaaugcagugccuuccagcccccaccuugcacucuuaggcgcuucuaggcaaauguauucugaagcagaaca

SEQ ID NO: 4201683 - RNA, 71 nt, Human
ugucccugugcagagaagccacugggggaauaagaucaguuagcccccacaccaucucuugcaaggugaca

SEQ ID NO: 4201684 - RNA, 95 nt, Human
ugucccuuucuuuauccuagucccaaugucacaugguucuggggccucaucuucagugcuagaguuucaaggauuauguguacuuggaggggaca

SEQ ID NO: 4201685 - RNA, 75 nt, Human
uguccgggaagcguaugcccaguuguucacaggacacacacacagauccaaagacaccaggcguggcccucgaca

SEQ ID NO: 4201686 - RNA, 73 nt, Human
uguccuagauaugacuagaagcucauuuuuacccugaauuuguggaauugagauaugacagucauaaagggca

SEQ ID NO: 4201687 - RNA, 73 nt, Human
uguccuaggucagggucuuuguugcaugcaucguccuguccuuagcaagagcuacccugugccauaugggaca

SEQ ID NO: 4201688 - RNA, 93 nt, Human
uguccucacaucuggaaacuugaguuuucugugugugacccaggagacuggcucauauuaacaaugaaacucagaagagagagguguggguca

SEQ ID NO: 4201689 - RNA, 60 nt, Human
uguccucaucuuuuccagaaauaucccauaaagcuggauuaagaggaugaugugaggaca

SEQ ID NO: 4201690 - RNA, 66 nt, Human
uguccugaacacaaugugauggguguuuuuuauuauaaaaaugcuuagagguguucaaauuggaua

SEQ ID NO: 4201691 - RNA, 72 nt, Human
uguccuggcauggacuagugcugaggugggaaauagaaaauucacauuugguuucugggccaaguuggggca

SEQ ID NO: 4201692 - RNA, 126 nt, Human
uguccuucauuugagcuaauaucgugacugaaagcacagcaaucugagagacauaguuauuuaaauuuaaaauugugcucacagcuuguuucuaagagaucaauuuauuaguccaggugggagaua

SEQ ID NO: 4201693 - RNA, 65 nt, Human
uguccuuguuccuaauguaaaaggugcuuaacugcuucuugguucuauuggguagcauugggaua

SEQ ID NO: 4201694 - RNA, 57 nt, Human
ugucgagcagagcagagacgucugguggagacagccgggugcuggagcucucugacg

SEQ ID NO: 4201695 - RNA, 70 nt, Human
ugucggugcaggccagcuugaugaccugugggacaucacagaagaaguuguccagcugguuugggccaca

SEQ ID NO: 4201696 - RNA, 70 nt, Human
ugucuaaccauauucauguacagccaauaguuguugagugcuuacugugugcuggacaugauguuagaca

SEQ ID NO: 4201697 - RNA, 106 nt, Human
ugucuacauagcaggaaugaaauagaaguuaauuaaauuauuacugaaugaucaagugagaguauuaaugugaacuuccaauuucuuuacccuauucuagcagaua

SEQ ID NO: 4201698 - RNA, 59 nt, Human
ugucuagaggccaacaggaaagggucaucagaaacccacuguucuggugcuucaggaua

SEQ ID NO: 4201699 - RNA, 81 nt, Human
ugucuagcagggucaucugagggacgagauuucagagugaacaccuugaacucuugguggucauuagaugguccugugaua

SEQ ID NO: 4201700 - RNA, 70 nt, Human
ugucuagccagguggcugagcagcugcaggaagcccucagcccugcucccgccaccaccuguggcuuuca

SEQ ID NO: 4201701 - RNA, 73 nt, Human
ugucuauuuaaaaggaauguuucaagggaaucauugcauguuuauauccuugacuuugccuuuuaaauguuca

SEQ ID NO: 4201702 - RNA, 93 nt, Human
ugucuauuuccugggcggugggcguucuucauucugugagccacuuggcuuuuacaguggaccugccauucuguggucccaaugagguggaua

SEQ ID NO: 4201703 - RNA, 85 nt, Human
ugucucaucauuagcuauuugggcagguggauguugauacagguuauucuuaggcaucagugccccauggcuaaugcuguaggca

SEQ ID NO: 4201704 - RNA, 58 nt, Human
ugucuccuacugccuguggaucuccuugcaggcuugagaccacugggguggugggaca

SEQ ID NO: 4201705 - RNA, 125 nt, Human
ugucuccuccacuagauccgagccaguggcucugcccagguggacagcagagucgccgcugagauucuaacugcuuccaucggggcucucggagcagcuguuggaacaggauggggagcagagca

SEQ ID NO: 4201706 - RNA, 89 nt, Human
ugucuccuuggauuuuguuuuauaaacuaguguugagggauuuuuauaaacuuccaaagcacagguaauacagaguaacaguaagcaca

SEQ ID NO: 4201707 - RNA, 72 nt, Human
ugucucuaaauguuccucgagcuccuaauucagccugauagaagguuagaggugagaggaacuuuggagaua

SEQ ID NO: 4201708 - RNA, 59 nt, Human
ugucucuggcccaugagcagagugggcuuuuaauccuuagccugaguguuucagagaca

SEQ ID NO: 4201709 - RNA, 56 nt, Human
ugucucugucuuccagggcuguucacucuacagcuagauggcucagcacagagaca

SEQ ID NO: 4201710 - RNA, 77 nt, Human
ugucucuuaagacucuaucuggcuuuauagugacaacaucaaaggauauuuguauuaguuaggguucugcagagaca

SEQ ID NO: 4201711 - RNA, 57 nt, Human
ugucugaagugcuguaugcauguuguuguucucaaggagaggcaggacacucagaca

SEQ ID NO: 4201712 - RNA, 92 nt, Human
ugucugaauauguguauguguguguguguguauguucauagggagaaaaauuuccucuccuggaacacagaugcauuacacaucuauggaua

SEQ ID NO: 4201713 - RNA, 63 nt, Human
ugucugaauucaagaaauucaauaacuccaccccaguggcuaguuggguuacuugauggcaca

SEQ ID NO: 4201714 - RNA, 58 nt, Human
ugucugagcuuuaugauggaagagaccacaccagucuuguucagucauauucucaaca

SEQ ID NO: 4201715 - RNA, 82 nt, Human
ugucugaguuuuuauacaggugcucuacagacaggacacucauucaagggggucuugaaaugcgauaggcauuuuucaggca

SEQ ID NO: 4201716 - RNA, 74 nt, Human
ugucugcagaugcuagcacuucugaggcacagaaaaugaaugguuuuaaaugugauccugguaugcacuugaca

SEQ ID NO: 4201717 - RNA, 130 nt, Human
ugucugccauauuuccuacacagcgauuuuggcuacauuaagcuuuugcacugagagcauaaagaguuuugagaaaaagugaugaugaugauggcucaauccaugugggaaauuaccauauaaacagaca

SEQ ID NO: 4201718 - RNA, 66 nt, Human
ugucugccuuugugaucaguucuuucguuugauauuuuugcagaaggaacugcaucagcacaguca

SEQ ID NO: 4201719 - RNA, 61 nt, Human
ugucugcuagcugguggcaauugaaguaagcauucucuucucccacagagacuagaagaca

SEQ ID NO: 4201720 - RNA, 65 nt, Human
ugucuggccucaaaagccauuuguaaagcuaacaaacaaaucacaaggcaaauugaggccaguca

SEQ ID NO: 4201721 - RNA, 63 nt, Human
ugucuggcugaagcuuuugcagcucuucagugauggagcugggaugauaaccucagucagaca

SEQ ID NO: 4201722 - RNA, 59 nt, Human
ugucuguacuggcugcaucgauggcugcaggaaggagaguugagcuuuuaguacagaca

SEQ ID NO: 4201723 - RNA, 58 nt, Human
ugucugucuguccuucucauuauguguucauuucuaucuggugaggaagcagaaguca

SEQ ID NO: 4201724 - RNA, 59 nt, Human
ugucugugguauaaaugacauccuugugcagugcacaaugggugcaacuauccaugaca

SEQ ID NO: 4201725 - RNA, 59 nt, Human
ugucuguugugcuuauagucagcauaaaauaguuuugcuguugcuaaguagugcaggua

SEQ ID NO: 4201726 - RNA, 61 nt, Human
ugucuguuuuguucacuguucuuccucagcacuuagaacuaugccuggcacagagcagaua

SEQ ID NO: 4201727 - RNA, 99 nt, Human
ugucuuaacauguuugaaccucacagagcccagaugucuaauuguauguucuuuuugucuuuauauggacaacugguuuuugacaaauguguuaaagca

SEQ ID NO: 4201728 - RNA, 60 nt, Human
ugucuuaauuucccuuugucauguaauguagcauauucacaaguucugggaauuaggaca

SEQ ID NO: 4201729 - RNA, 108 nt, Human
ugucuuaguugcccuuuauaauggaauugauuuuuuuaacucacaggaucagauuucuguacaugaguucuguguccuuuaaaaaagacacuuuggggaugcugagca

SEQ ID NO: 4201730 - RNA, 67 nt, Human
ugucuuccuccagcaggacugaggcccagggaagaauagucagcggggucugggguguugagggaca

SEQ ID NO: 4201731 - RNA, 80 nt, Human
ugucuuccuucuuccauccaugucccguuucuggcuuuguggcugaggcaggaaugggugauggugguguguggugagca

SEQ ID NO: 4201732 - RNA, 61 nt, Human
ugucuucuagucucugugggagaagagaaugcuuacuucaauugccaccagcuagcagaca

SEQ ID NO: 4201733 - RNA, 94 nt, Human
ugucuugaucaguagugugagaacggacuaauaaauauaucaugcuuugagguauauauuguuaguuuucaauacguaucaacuaaucaaaaca

SEQ ID NO: 4201734 - RNA, 86 nt, Human
ugucuugcacugccagcugggucccugcuggggcucugggacuuccacuucucaguccacauaggaacccagcuuccacugaguca

SEQ ID NO: 4201735 - RNA, 66 nt, Human
ugucuuggcaugcaugggcaaucagauguuugaagaaaauugaugaauaaccauguguccaagaca

SEQ ID NO: 4201736 - RNA, 95 nt, Human
ugucuuuaguucugagauaagccgcugcacugauucuguugucuggguccagacaagggaauugugugugagaggcagcacuuagaguucagaca

SEQ ID NO: 4201737 - RNA, 77 nt, Human
ugucuuucaugauccaggaaucuggggccucugcaaacaccacgcaacagaagggcuccacuugaaucacacagaca

SEQ ID NO: 4201738 - RNA, 103 nt, Human
ugucuuuuaagagcuuuugauacaauacugaguuuacauucaucuguuauuuauugaacacuugcuggugaaaggcaucaguguuaucugcucuuagggaaca

SEQ ID NO: 4201739 - RNA, 67 nt, Human
ugucuuuuccauucacuaauuaggggaguaauguuccuccuuugguuguagacaggaauauuaagca

SEQ ID NO: 4201740 - RNA, 82 nt, Human
ugucuuuucuggccauggcaagccgaguguugggagagaagaaugcacgccugguauucagugcuguggcacagacaaguca

SEQ ID NO: 4201741 - RNA, 85 nt, Human
ugugaaaacaugagauuugggaggggccagggguagaaugauaugguuuggcucuguccccacccaaaucucaucuugaauuaua

SEQ ID NO: 4201742 - RNA, 63 nt, Human
ugugaaaaugcagauucugcugcagcaggucuggcugggaccugggauucugcaguuuucaca

SEQ ID NO: 4201743 - RNA, 59 nt, Human
uguuucaguccacuuaggcagccauaauaaauuaccauggacuagguggcuuguaaaca

SEQ ID NO: 4201744 - RNA, 77 nt, Human
uguuucagucuggaagcccuggcauuucuauucauguccacagcauggacaugaggaacucaggagucaccagagca

SEQ ID NO: 4201745 - RNA, 77 nt, Human
uguuucauacaggaggugcuguuuguccuggauuuuagagaaagcuuccagagagauaguggcuaauaaaugaaaua

SEQ ID NO: 4201746 - RNA, 78 nt, Human
uguuuccugcuuuaggggcuggccauuguacaaggugaaauuuuaaaauucuaaagcaaugaaaguuuugcagaaaca

SEQ ID NO: 4201747 - RNA, 81 nt, Human
uguuucuaauuggauagcagaauaucccuaguagcuguaaauguuggcuucugugguaaacuuuguuguaaauuuaagaca

SEQ ID NO: 4201748 - RNA, 78 nt, Human
uguuucuauucucaucuccuuggaucacguuuagucacuugacugcaccuaguggcaacggaguauaggaaggaaaua

SEQ ID NO: 4201749 - RNA, 61 nt, Human
uguuucucagaucuugcugcuucuuucaaaauggaaagaggccaccuucucuugagaaaca

SEQ ID NO: 4201750 - RNA, 66 nt, Human
uguuucucugaagauauuuauuauuaugcaauaacuuaauaguuuguaaauaucuucaugguggca

SEQ ID NO: 4201751 - RNA, 63 nt, Human
uguuugaaguaaaugauuaaaagaggaggaaguuaccacauucuggaagauuuacuugagaca

SEQ ID NO: 4201752 - RNA, 86 nt, Human
uguuugagacuuuaccaagaguugucacuguuucagaaugucaguucaugacagggacgcugcucuagguauucgagucuucaaca

SEQ ID NO: 4201753 - RNA, 55 nt, Human
uguuugcaggaacucuggggagagugccguggcuucucccacauuucuucaaaua

SEQ ID NO: 4201754 - RNA, 85 nt, Human
uuagagccagagaaugcagggcuucggacaacaaagaccucuggggacagggcagaugucccugagccuggauuccugccucuga

SEQ ID NO: 4201755 - RNA, 130 nt, Human
uuagagcuuccuugccacuguccaaagagagucuuucucuuccuguuagggguuuccuuuuaugacacagaacuagaagacagacagagaaugggcuugagauccauggaugaagggaaggguuuaauga

SEQ ID NO: 4201756 - RNA, 60 nt, Human
uuagagguaguguaugugaaacuuuccaaagcacuuuuugcuugcauauuuuaccuuuaa

SEQ ID NO: 4201757 - RNA, 57 nt, Human
uuagaggucaggucgcagaggaagcacugguuaccaagucgcagaccugaguucuaa

SEQ ID NO: 4201758 - RNA, 101 nt, Human
uuagagucaguucagugcuguuccaugucuuuguaggacugucaucaggagacuggaaguucugggaaaaacauggccaaugguuugaauucagauucuga

SEQ ID NO: 4201759 - RNA, 81 nt, Human
uuagaguugauguuguaucagugccuauaaaaugaauuaaaugaauucauauuuuaguugcugaacagcaguuguagcuga

SEQ ID NO: 4201760 - RNA, 88 nt, Human
uuagaguuuagguggagaacucuuucaguaccauugaguguucucuaguaagaggaucuuacacuguuggguuucucacuugcuuuaa

SEQ ID NO: 4201761 - RNA, 63 nt, Human
uuagauaguauuguuggaaggguaaguugaucauauuaaauugcuuuucaaggguacagcuaa

SEQ ID NO: 4201762 - RNA, 60 nt, Human
uuagauagucuucacugugaauuuguucuugcagcaaguggaagaaugcagugugucuaa

SEQ ID NO: 4201763 - RNA, 76 nt, Human
uuagaugauuuuaagugaaggaccaauaugacucauguuacaugagcagauauggauuuuagagaggucaaucuga

SEQ ID NO: 4201764 - RNA, 76 nt, Human
uuagauucuacuaaaggcaguuggaguugaggaaauuaguugaaugcuuccucgguaauugucggugaggauguga

SEQ ID NO: 4201765 - RNA, 82 nt, Human
uuagauucucauaaggacagcgcaaccuagaucccucacaugcacgguucacaacaggguguguucuccuaugagaaucuaa

SEQ ID NO: 4201766 - RNA, 124 nt, Human
uuagcacccacagaugguuucagauacacucagaugucacaggcauccaggacuaggccugcuuugaucauuuggagggcaggauuucuggauaccugcgucaccuguagccaucuacugcuga

SEQ ID NO: 4201767 - RNA, 80 nt, Human
uuagcacuaguguuuaagaagaugacuuuggaguuggagagacagguucaaauccagacucugucacuuccuaguaauga

SEQ ID NO: 4201768 - RNA, 115 nt, Human
uuagcagagugcuuaugaagauaguuucuucuaaaugugcuuauuaauauaauauauauacuauuaaugaaaggcaguuuggaacugggaucauuaaacauuuccacucugcuaa

SEQ ID NO: 4201769 - RNA, 64 nt, Human
uuagcagcggucaguuuugaagcucuaaagugaagcggagcuuuagguauuuccccuugacuaa

SEQ ID NO: 4201770 - RNA, 66 nt, Human
uuagcauaagggcaagcucuuuaguguccuucaaagcacauauguaaauagcugccuguguacuaa

SEQ ID NO: 4201771 - RNA, 111 nt, Human
uuagccaagcaaggugguguaugucuguagucccagcuacuugggggucugagcuggagcccaggagguuggggcuacagugagcuguguuugcaccacugcccuggguga

SEQ ID NO: 4201772 - RNA, 118 nt, Human
uuagcccaaugccucuuguauaacauucaaaaaaguuagcuauuaguaggugcuauaaaauuauaaaguuuuuacucucugaccuuuggaguugaaacaguggcauuagauggguuga

SEQ ID NO: 4201773 - RNA, 65 nt, Human
uuagcccuggcacagguuccaaggggguggaauuagaacccaucguggaaccuaggcagagcugg

SEQ ID NO: 4201774 - RNA, 84 nt, Human
uuagccuuccgcuacacuggccuucauuuguaugggauccuucuuuuuaugcagccucaguaucagaacgagccaggagguuaa

SEQ ID NO: 4201775 - RNA, 79 nt, Human
uuagcucaaguauuauggggguuuaauccacucuagagaaaauggaguaaaggaagaauucucugugauggugggguaa

SEQ ID NO: 4201776 - RNA, 80 nt, Human
uuagcuccugcaccacaguuccucgcuguccaccccaggcuuccggacuggaaggacagugggacagugacgggggauaa

SEQ ID NO: 4201777 - RNA, 121 nt, Human
uuagcuguuacuacaacacaaacuuucauucugucauucuuacauaaugugacccauucaaaggaugugucagcauucaugaagucaugacucagaagacgaugagcugugucagagcuga

SEQ ID NO: 4201778 - RNA, 66 nt, Human
uuagcuguuggcuuacaucuguuggacuauuucaaauaucucccagcauugccugccuauugcuaa

SEQ ID NO: 4201779 - RNA, 78 nt, Human
uuagcuucaggguagggcugaggcaacaagggagugggcuuccuuagcagccccaaagccugggccuccugaagcugg

SEQ ID NO: 4201780 - RNA, 82 nt, Human
uuagcuucugcagacuugauaaccacugggagauacaccuguguauagggcgguugugauugaagucugcagcucuagcuaa

SEQ ID NO: 4201781 - RNA, 90 nt, Human
uuagcuuugggauguuuugucaaaucaaaccacauucuuuagauaaggaguuugguuugcuuugauauuuagugaccuucccuuagcuag

SEQ ID NO: 4201782 - RNA, 86 nt, Human
uuagcuuuucauggggugaauuaguaugcuacagaauaauuuaguuauuuaaggcagcuauaguacuucucuccuuggcuggcuaa

SEQ ID NO: 4201783 - RNA, 69 nt, Human
uuagcuuuuccauggauuuuguuacuaucuuuuuucucguuacugggauaugugucuguggaaaacuag

SEQ ID NO: 4201784 - RNA, 67 nt, Human
uuaggagagcagugggguccucaguaugguuccuuuaggcagcucugcugaccccacccuuuccuga

SEQ ID NO: 4201785 - RNA, 71 nt, Human
uuaggauauugagagagugagguguagaauuuaaaguuaaaaaauuuuacaucacuuuacuuaauaauuga

SEQ ID NO: 4201786 - RNA, 77 nt, Human
uuaggauuugcuuuuccauuguaguaucuguuuuaguuccuuaggacuggaaaacugagugggauugcaucuauuga

SEQ ID NO: 4201787 - RNA, 70 nt, Human
uuaggauuuuugaugaggauugcauugaaucuguagauagcuuugaguauuauugucaucuuaaucuuaa

SEQ ID NO: 4201788 - RNA, 87 nt, Human
uuaggcauuccggacaagacaauucuucguuguguguggagagggaggcuguccugugcuuuggaggauguucggcagcaugucugg

SEQ ID NO: 4201789 - RNA, 76 nt, Human
uuaggccaugcagcaaagaggcuaguuuuccagaauuggauccacuucuucuaggcauccuugcuguaauguuuaa

SEQ ID NO: 4201790 - RNA, 129 nt, Human
uuaggccgcuuugcaucaggagcccuaagggucuguggccauuuggaaggcaaguaggcagaauagcuaccugcauggcuuccagugcuuacggagagaggaggggaauauggcauggcaaagugggga

SEQ ID NO: 4201791 - RNA, 57 nt, Human
uuaggccuuugauuggggugcucugugcuacagguagugccaaaucgagggcucuga

SEQ ID NO: 4201792 - RNA, 84 nt, Human
uuaggcuauaaaaguuugagaaaaccagaaagaucuugacuucauagauuuuuuguuguugucucauaguaaauuuuauucuga

SEQ ID NO: 4201793 - RNA, 63 nt, Human
uuaggcucucccuggauuuccaaguguugcuaaauuuaguucauucuaaccaggagaggcuga

SEQ ID NO: 4201794 - RNA, 55 nt, Human
uuagggaaauaaaauuaucaguacaguaaacuggaaggcuguuucuuuucccuga

SEQ ID NO: 4201795 - RNA, 103 nt, Human
uuagggcauuuucauauauucuugugauuauaaaguaguauguucaaguuuuaguaaauuaauauuacguuaucagguaugcaagaggagugagaaccacuaa

SEQ ID NO: 4201796 - RNA, 61 nt, Human
uuaggguagauuugcauuuuaaaauugcucauaagacaaaaaaauguagacuuuucccuga

SEQ ID NO: 4201797 - RNA, 59 nt, Human
uuagggucuagaauggaugagcauuuuuuuagaaggagcucagcaacucuagaaucuga

SEQ ID NO: 4201798 - RNA, 71 nt, Human
uuaggguuucuuuuuggauagcugaugaaacaaaguuccuauuguuucauccucaaaagagagggcccaga

SEQ ID NO: 4201799 - RNA, 63 nt, Human
uuagguaaauuccucucuuugggccucacuugcaacaccaauaaagagaggaaguuauacuag

SEQ ID NO: 4201800 - RNA, 67 nt, Human
uuagguauaaaugauuggcaagucucaaccuugcuaaaacugagacuuuucaauuagcuaugcuuaa

SEQ ID NO: 4201801 - RNA, 72 nt, Human
uuagguugcuacaaaaguaauugugguuuuugucauuaaaggucauggcaaauuacuuuuguaccuacuuaa

SEQ ID NO: 4201802 - RNA, 79 nt, Human
uuagguuggugcaaaagcaguuggauuuuuugccauuaaaaguacaggcaaaacagcaauuacuuuugcaccagccuaa

SEQ ID NO: 4201803 - RNA, 79 nt, Human
uuagguuggugcaaaaguaauugcaguuuuaccauuaaagguaauggcaaaaaccgcaauuacuuuugaaccaaucuga

SEQ ID NO: 4201804 - RNA, 63 nt, Human
uuagguuuaugaggucugcauuguuaccaagaagugauaugguuugcagcuguaugagcuuaa

SEQ ID NO: 4201805 - RNA, 96 nt, Human
ugugaaaucauuuuacacuacuugguuuauauccaaaggcaaggaggaaggaaccuuccuccuugccuuuggauauuaaaguagaaugguagcaua

SEQ ID NO: 4201806 - RNA, 93 nt, Human
ugugaacuauuacgugcuuucuaaaggcuuuuuguuuaaaugcuauuuauuuaucuggcaucaguaaaaccugcuuuuaguguauguuucaca

SEQ ID NO: 4201807 - RNA, 71 nt, Human
ugugaagaacuggcaggucaucaacuguaauuuuuuuuaauuaaaaaauuaagaugaucuucaaaggcaca

SEQ ID NO: 4201808 - RNA, 68 nt, Human
ugugaagcauacaguaggugcucaguuaaggcugauuuccuaauugagugacugcugcaugucaagca

SEQ ID NO: 4201809 - RNA, 56 nt, Human
ugugaaggcagccaucgacaguuuggaaauaggcaaauaggcauggcuguguucca

SEQ ID NO: 4201810 - RNA, 91 nt, Human
ugugaaggcauaagauuugggaggggccaggggcagaaugauaugguuuggcucugugucuccacccaaaucucaucuuguagcucccaua

SEQ ID NO: 4201811 - RNA, 55 nt, Human
ugugaaggcuaauuaaacaaguucgcuuuugaaauaugaccucuuagccuuuaca

SEQ ID NO: 4201812 - RNA, 61 nt, Human
ugugaauaaucacccuucuggaugauugauugcuucaguucacugaaaguguuuguuuaca

SEQ ID NO: 4201813 - RNA, 78 nt, Human
ugugaauaaugauguguauuaguuaguuuaaugucuuccaagugcauuucauuuugaaugauauacucagauagcaca

SEQ ID NO: 4201814 - RNA, 60 nt, Human
ugugaauaaugccgcaauaaacauacgugugcaugugucuuuauagcagcaugauuuaua

SEQ ID NO: 4201815 - RNA, 102 nt, Human
ugugaauucuuagcucugccaggagaggcucuaacucuguguuuuugauagacgggaaaggcuacaguuucucuuguuccuuugcagagcguaaaauuuaca

SEQ ID NO: 4201816 - RNA, 56 nt, Human
ugugacagugccagcuucauagccuagucuaggcaugccaguugcccacuguggca

SEQ ID NO: 4201817 - RNA, 64 nt, Human
ugugaccguggggacuugcucgggcuuuuguucccagaaaguaagaccaagugaucauuucaca

SEQ ID NO: 4201818 - RNA, 59 nt, Human
ugugaccuuauuuggaaguagggucuuugcagguguaauccaguuaagaugaggucaua

SEQ ID NO: 4201819 - RNA, 67 nt, Human
ugugaccuugaccauuucccccaccauuaagaucuuggaggucaaagggugagauggcaggauugca

SEQ ID NO: 4201820 - RNA, 81 nt, Human
ugugacucagacagcuggcagguccaagauagagcauauggaugaugcucuaaugacaucuguccaguuguuguaaucaca

SEQ ID NO: 4201821 - RNA, 62 nt, Human
ugugacugauccugcaaguguguugacuuauuuuucugcacaaggcaacauagaucagggca

SEQ ID NO: 4201822 - RNA, 64 nt, Human
ugugacugcugcgacugcuucucaucaccccagaagauggagaauggaauguugugcaggaaca

SEQ ID NO: 4201823 - RNA, 60 nt, Human
ugugacuucauuucauaguuguuaaggcccugguauacaauaacaguaagugauguuaca

SEQ ID NO: 4201824 - RNA, 55 nt, Human
ugugacuuuucuuuuguaugcuaaaaucuagcagaaacacagggcuagaguuaca

SEQ ID NO: 4201825 - RNA, 61 nt, Human
ugugagcaccccgcaaaugugcaagaauauuaucaguucggcauguguggugugcuccaca

SEQ ID NO: 4201826 - RNA, 68 nt, Human
ugugagccagaguugaaugugagucucuccaaaauagaggcagauacaguuuagucucugguaaucca

SEQ ID NO: 4201827 - RNA, 67 nt, Human
uggagagaagucacccuagggccuggacuguggugauaauggugcugguucaggguggcuguuucca

SEQ ID NO: 4201828 - RNA, 88 nt, Human
uggagagaguggauucagacagaagagcuggcucugugcugguuuuccaggggucagcccuuuugucagcgacgagucugccucucua

SEQ ID NO: 4201829 - RNA, 56 nt, Human
uggagagcacaguuccugcuuccaaauuggcuugaaguggggacaucugcucugca

SEQ ID NO: 4201830 - RNA, 97 nt, Human
uggagagcccuugauguuuauugcaaauaaugcgagccaguuuugucauuggcacuuacugguuuuuugcuuguuuguuagauaucuguaucuucca

SEQ ID NO: 4201831 - RNA, 66 nt, Human
uggagagggcgcccaggcccacgccaggaucacucagcuugaugaaggggcuggugcccucugcca

SEQ ID NO: 4201832 - RNA, 93 nt, Human
uggagagguaucaugcucagcacuuugaagcagaaggaugucuaucuuauucaccugucuuuaauagugccugggacacagcuggugacucca

SEQ ID NO: 4201833 - RNA, 63 nt, Human
uggagagugguuugggggacaucgaagguggccuucucaccugcuccccacgccagcuuccca

SEQ ID NO: 4201834 - RNA, 111 nt, Human
uggagaugagcucgucaugauuggccaggugugcucugcaguggauacagcuguacguucggugacaguucggcagauacgcuuggaaaguuuuggacuuugucauuuuca

SEQ ID NO: 4201835 - RNA, 56 nt, Human
uggagauggggcuuucucuagcugagauguuccagccacagccagagcuaucucca

SEQ ID NO: 4201836 - RNA, 64 nt, Human
uggagauucuaagucguugguuagugguacucauuaacaguuaaacaauuggcuagaaucauca

SEQ ID NO: 4201837 - RNA, 76 nt, Human
uggagcaagaaccaaaaugaagcuagguuuguucaaucauacuuaaagaggcuacuuuugguuuauuuugucucca

SEQ ID NO: 4201838 - RNA, 77 nt, Human
uggagcaugugggccccuuuagaggccuggcagagucuaagugggccuccagaggguuucccaugaaaaagugacca

SEQ ID NO: 4201839 - RNA, 105 nt, Human
uggagcauguugagugcacgacuuguuauggauccaagaaagacgcuccuuggcuuucuuguaagauguuuauuaaagcaaguccugcccuuuccccaaccucca

SEQ ID NO: 4201840 - RNA, 61 nt, Human
uggagcauugugcuaagacacacccccccgguguggggauguaagaagggccagagcucca

SEQ ID NO: 4201841 - RNA, 58 nt, Human
uggagccaaugaacauuugcuggaaucccuuucuuuaaagcaguguuucuugacucua

SEQ ID NO: 4201842 - RNA, 71 nt, Human
uggagccauccccacccucccugugcacauuugcugggaguuugacagggacaguggagauggaacagcca

SEQ ID NO: 4201843 - RNA, 86 nt, Human
uggagccccugccacaggagggccguuugugugccuuuaucccaucaaggcagcagcaggagcugcucuccugacgagguucucca

SEQ ID NO: 4201844 - RNA, 95 nt, Human
uggagccuaacuuccuuccacuugcaugugugcuggacuuagugacucaauuguaaagcacagaaugagguggaagugauagugugucauuucca

SEQ ID NO: 4201845 - RNA, 63 nt, Human
uggagccuaggaaccuacguauuauguauuacagcaaaugccucuggguuauucuaggagcca

SEQ ID NO: 4201846 - RNA, 74 nt, Human
uggagcucguggcuggcuaggggguucuccaugugcucauggccaggagagucugccgagccagcccagcccca

SEQ ID NO: 4201847 - RNA, 118 nt, Human
uggagcugccccggggccucuuccuccaugccaagcgcuuggcacacuuggaccugagcuacaacaauuucagccaugugccagccgacauguuccaggaggcccaugggcuagucca

SEQ ID NO: 4201848 - RNA, 68 nt, Human
uggagcuugcagggcuaagucagagccuggcgggaguggcagguuacuuccuacuuagccccucucua

SEQ ID NO: 4201849 - RNA, 61 nt, Human
uggaggacucugaaucccagcucaguacuguugcugcuggaaagggacuuaugaguuccca

SEQ ID NO: 4201850 - RNA, 75 nt, Human
uggaggagcacagcuucaccgagcccauccucaucccuaagaaagacgggcugggcuuggcugucccggccccca

SEQ ID NO: 4201851 - RNA, 55 nt, Human
uggaggaguagauuuucagagguuuuuauucugccauucugaaagcccuuuucca

SEQ ID NO: 4201852 - RNA, 91 nt, Human
uggaggauacuggugggggcuauacguuuggugaaauccaucagugauauucaagccaagcaaauaaucacccacuaauuuguguuuucca

SEQ ID NO: 4201853 - RNA, 129 nt, Human
uggaggaugguagcucucuucucacaacuccacuaggcagugccccaguagggacucgguguggcagcuccaacccauuucccuuccgcauugcccuagcagaagcuccuugagggucccacuccugca

SEQ ID NO: 4201854 - RNA, 73 nt, Human
uggaggccaggaagcccaagaucagggugcuggccuguucauuuccugguaagggcucucuuucuggcuugca

SEQ ID NO: 4201855 - RNA, 123 nt, Human
uggaggcccagaaagggagagggauuugcucaaggucacacagagaauuaguggcagagaaaagacuguagcccagaucuccugacccucaguacaguucucuuuuccauacaugcaccucca

SEQ ID NO: 4201856 - RNA, 60 nt, Human
uggaggcccaugcagaguccaugagggguggcuucuuucccacagacuguaugggcacca

SEQ ID NO: 4201857 - RNA, 56 nt, Human
uggaggcccccaggcaacagcacugaucagcucucugcugcuccucugggcuucca

SEQ ID NO: 4201858 - RNA, 112 nt, Human
uggaggcuuagagaggcuggguaacuuuucugaggucauaaagcaacuuuugggagaaaaagaccagauguagguuugugugacucugaagcacagguucuuaaaaacucca

SEQ ID NO: 4201859 - RNA, 59 nt, Human
uggagggcaucuguggucaggcugcaacuucaggggagaauuuccacagguguccugca

SEQ ID NO: 4201860 - RNA, 62 nt, Human
uggagggccuggcugcccccccaguaacucggggcucaucaggggcagagcuaggcccugca

SEQ ID NO: 4201861 - RNA, 59 nt, Human
uggagggcuccucacauucucuaugaaaauauauaauagaugagaugaggggcuuucca

SEQ ID NO: 4201862 - RNA, 65 nt, Human
uggagggcugguacuguggcugucaccucugcugggguguacaguacuucagaaccagccucaca

SEQ ID NO: 4201863 - RNA, 76 nt, Human
uggaggguccguguugccccaagggagcccagcacaccaugucuugcuugggcuggagucccuaggggucccucca

SEQ ID NO: 4201864 - RNA, 74 nt, Human
uggagguggucagucgccagguuuuauuucagugauaaaagagaagugaaucuggaucuaugaucaauaauuca

SEQ ID NO: 4201865 - RNA, 63 nt, Human
uggaguaacagaccuugcaggaaacgugaauagcaaaaccauucaaaccuggaggucacuuca

SEQ ID NO: 4201866 - RNA, 80 nt, Human
uggaguaggggcuuggggaggacgcaguguccugggcugggacccaagagacccuguggcuucgccgcuaaccccuccca

SEQ ID NO: 4201867 - RNA, 65 nt, Human
uggagucaggagggcugggaggguguagccucugccaacccugccucugcuuccuguagcuucca

SEQ ID NO: 4201868 - RNA, 82 nt, Human
uggagucaucacagcagaauuuaggaggcagaagccccacaguuucaaauuuugccuaugaguucuagcaugguagacucca

SEQ ID NO: 4201869 - RNA, 108 nt, Human
uggagucgacaaaguaguggaacuuccucuugaacacguccaggguguggcccaggaccuggcgguagucggccuugcccugggcgaucagguucagcugcuucucca

SEQ ID NO: 4201870 - RNA, 71 nt, Human
uggagugcugcuugggauagugaggaaggagcuugauuuccccuucacccugugaggcauuggcaacucca

SEQ ID NO: 4201871 - RNA, 59 nt, Human
uggagugcuuuuccauagccaaugggcacauguuuguguaucugugggaaggcuuucua

SEQ ID NO: 4201872 - RNA, 79 nt, Human
uggaguguuuccuccuauugugguuuucaugauugugcuaugaaguguucuuggaaacuaggauggaagaaaugggcca

SEQ ID NO: 4201873 - RNA, 58 nt, Human
uggaguuaguagcauuucaugacauggcuucaaccagcuguauuugcuacugacccca

SEQ ID NO: 4201874 - RNA, 69 nt, Human
uggaguuccucagauagcugaucacauuguaggcugaaaacaucuacaagucaagucuaucaaggacca

SEQ ID NO: 4201875 - RNA, 72 nt, Human
uggaguucucugauacaaugcuaauaaauuuauccaaagcuaaaauuugaaugaauuguauuagcugcuuca

SEQ ID NO: 4201876 - RNA, 90 nt, Human
uggaguucuuuagugugucaauuuaugucauucauaaauuaugcaagcccauuacaugggugaguaugaguugacuucuaauucauucua

SEQ ID NO: 4201877 - RNA, 99 nt, Human
uggauaacuucuuuugguuucauucucucaucuguauauagugaaugauccugagucuuccuagcucauagagaugucauaaugguccaaugagaucca

SEQ ID NO: 4201878 - RNA, 75 nt, Human
uggauaauccacucugcugacuuucaagauuauuauauuauucaauucucaggaauguugcagagugauugucca

SEQ ID NO: 4201879 - RNA, 71 nt, Human
uggauacuuuguaagcugucauagccgauagccuuuagguguuuugaaaccuacagucuuacaaaugucca

SEQ ID NO: 4201880 - RNA, 79 nt, Human
uggauauaugcauguuaucauuuuucaguggauauuuugcuacugugaagaucaaguguuggcuaauguauguaauuca

SEQ ID NO: 4201881 - RNA, 71 nt, Human
uggauaugacuuuucuuuaccugaauauguuuuucucuggggcaaguuuuugguagagaaaaguagggcua

SEQ ID NO: 4201882 - RNA, 64 nt, Human
uggauaugcaagucacgucucccuaggucuucugcagcccccaggagagagacuugaaucucca

SEQ ID NO: 4201883 - RNA, 64 nt, Human
uggauaugcuauacauaugacaucacacauguaagguguguaucacagugaauggcauacacua

SEQ ID NO: 4201884 - RNA, 67 nt, Human
uggauaugggauuggcuagccagugucugccacaccaaggagagacccuguuaguuccagucuucca

SEQ ID NO: 4201885 - RNA, 82 nt, Human
uggaugacuguuggcaggcagaaaaauagaauauaccagguucccauauaaagauuuauuuguugcuaugagucauggucca

SEQ ID NO: 4201886 - RNA, 90 nt, Human
uggaugccggagaccugcagggccaggccugcucugcagucccuacggcugcccauccccgcaggcauggucgcugccaggucggcagca

SEQ ID NO: 4201887 - RNA, 69 nt, Human
uggauggauugacgaaggcagcaaagccuagcagucacacugaagcagcucccugccgucaaccaacca

SEQ ID NO: 4201888 - RNA, 63 nt, Human
uggauggcuguggucuuugcccccagcucacugagacuguugagggcaaggaaacagccccca

SEQ ID NO: 4201889 - RNA, 106 nt, Human
uggauggcuuauuucagagaaugaggcaguauucuccauuccaagaggcuaccaagugccuuauggaaacaggagaauaucuucuucccccaaaugucccucucca

SEQ ID NO: 4201890 - RNA, 57 nt, Human
uggauggguggauaaaugugucagcaaugaaugcucagauuugucccuucccauuua

SEQ ID NO: 4201891 - RNA, 74 nt, Human
uggauguccaaagugccugacucauaguuagcacuccauaaagguuaacuauuauuagcaucuuugacauucca

SEQ ID NO: 4201892 - RNA, 68 nt, Human
uggaugugcaagaugagaaccaguugucaaggauucuuucuucuuuugaauuucucuugcaauauuua

SEQ ID NO: 4201893 - RNA, 82 nt, Human
uggauguugccacagcaaaguaagcugacauguauuugaggucauuugcaugagucaaacuuugcaaugaguaacucaccca

SEQ ID NO: 4201894 - RNA, 71 nt, Human
uucaacugaaauggccaaaugugggugcugauuucggcccugauuaguuuuacaucagccauuguucugga

SEQ ID NO: 4201895 - RNA, 57 nt, Human
uucaacugugucuaugcugccugcugucugcugcgggaagugucagaauucauugaa

SEQ ID NO: 4201896 - RNA, 61 nt, Human
uucaacuuuaggcaaagaaaacuuuuaaacaaaaaguauuagguuuuugucugaauuugga

SEQ ID NO: 4201897 - RNA, 69 nt, Human
uucaagacaaacauuaauuaacauguucgagacuuguugagaacaugauuggaaaaugcugucucugaa

SEQ ID NO: 4201898 - RNA, 99 nt, Human
uucaagagaguuuccaauuaguucagucaugaccaugggguggaaccaguccgggcuuccucuucuaaugauuagaucugaaaugaugaagccuaugaa

SEQ ID NO: 4201899 - RNA, 64 nt, Human
uucaagaguagauaggugccaugaagaaggaauucaacaugggcugaaaaucugcaaacuugag

SEQ ID NO: 4201900 - RNA, 74 nt, Human
uucaagauaagaggcugaaggagaaaaauacauuuuuuuguaaaugucaguaguuucuuugaguuuuucuagag

SEQ ID NO: 4201901 - RNA, 57 nt, Human
uucaggugaguauaguuaaauucuuagaauaguaagagugacucugaaccacuugaa

SEQ ID NO: 4201902 - RNA, 61 nt, Human
uucaggugucugccucuuugaguucgcugaaaaguuggaucuuacauauuuagcaccugaa

SEQ ID NO: 4201903 - RNA, 82 nt, Human
uucaguaaaagggaaauauuucucauuaagaucuuccaagaaugagcugucuuugggagguaaugaguucucuguugcugga

SEQ ID NO: 4201904 - RNA, 55 nt, Human
uucaguacaaugucugacacaguagguuugaaaugaaucuaugcauuggacugaa

SEQ ID NO: 4201905 - RNA, 64 nt, Human
uucaguacacacuauuuaaaguguuuaauccagaauuuaggugcauuguaguguguauuuugag

SEQ ID NO: 4201906 - RNA, 96 nt, Human
uucaguagaagaguauggauagucugauuugcagagcaggcuccaaauuucugaugagccuuuugaaauagaaaucugaaagcuuuuacuacugaa

SEQ ID NO: 4201907 - RNA, 105 nt, Human
uucaguagcucuauuuaggagggauauuguaucuucuguuuagaagugagaacuuauucauuuacuaagcccaguuauaugccauccacucugcaaagcacugaa

SEQ ID NO: 4201908 - RNA, 55 nt, Human
uucagucccuugcuuaaauuuacauggcugguaauugacagagcagggacuugaa

SEQ ID NO: 4201909 - RNA, 114 nt, Human
uucagugagccucugggauggccaguggcucugugcuugggaagguguuuuccuaggagaaguuagcagguccagcauagaggcacuggggaccccugaguguucuagcaggaa

SEQ ID NO: 4201910 - RNA, 128 nt, Human
uucagugaugucagaagugguggugacugguuuauuuguuuuuccgucuuagagauguuuacuguuacucugaggugucacaaggccaggcuaaccaggaacaacccuugcuuaauauugucauagaa

SEQ ID NO: 4201911 - RNA, 57 nt, Human
uucagugcagacgccgaagcccagcaugcugaggucauacagguaucugguacugaa

SEQ ID NO: 4201912 - RNA, 60 nt, Human
uucagugcuaggucgugugcugggggcacugacagccuucaggagcaggccuaggcagaa

SEQ ID NO: 4201913 - RNA, 80 nt, Human
uucaguggcacagauuuauugaagcugcugccagcaacaauuugcucugauucgcugcaguuuuaauaguuccugcugaa

SEQ ID NO: 4201914 - RNA, 78 nt, Human
uucagugggaaggggagcuggaaaggagauguggcugguaaguaauccuccucugaaguucacccaucuccagcugga

SEQ ID NO: 4201915 - RNA, 65 nt, Human
uucaguggucuaggcaauauauaaggaugguuucugauaccuuggugaugacagagauggcugga

SEQ ID NO: 4201916 - RNA, 60 nt, Human
uucagugucacccaaggguccaccaugugcucacugguggacaucccagggugaaauggg

SEQ ID NO: 4201917 - RNA, 88 nt, Human
uucaguguggggccaauagcaggagaaaugagagacagaaccuaaauguuaucauuuaucauuugugcuguaggccuaggguuuugaa

SEQ ID NO: 4201918 - RNA, 74 nt, Human
uucaguucaucaguuguacuagccacauuuaaagugcucaguagccacauguggcuggugacugccguacugga

SEQ ID NO: 4201919 - RNA, 77 nt, Human
uucaguuuagcuucauuuggcgugauuguguacuaaggauagggucuucuaauaugcaaaugaggcuguguucugaa

SEQ ID NO: 4201920 - RNA, 65 nt, Human
uucaguuugccaguauuuuauugaugauuuuugcauugauguucaucagggauauuuggccugaa

SEQ ID NO: 4201921 - RNA, 75 nt, Human
uucaguuuugguccuuucuagguauccacaucuuacccaggguugggggaaugccuagagagaaccauaacugaa

SEQ ID NO: 4201922 - RNA, 83 nt, Human
uucauaacuaucagucaugugaaauuuggcaggccccuagcccguuaguggccacagucacaugauugauuaccgguugggga

SEQ ID NO: 4201923 - RNA, 79 nt, Human
uucauaaguugcagagcaguaggaauauaguauaaugauuaaaagcauagauuuauauucaggcugcgcacaguaugaa

SEQ ID NO: 4201924 - RNA, 66 nt, Human
uucauagacauuuugcauucaagcacugcaguaaauuugggugcauauuuguaugauguuuaggaa

SEQ ID NO: 4201925 - RNA, 58 nt, Human
uucauagccacuuugaauugaggucauucagccuuuugauugaaaccauggcagugag

SEQ ID NO: 4201926 - RNA, 98 nt, Human
uucauaggaugugguuagguuaccaguaauguaacuuugcaaacagcuuuugggaauuauuuacuagcugggaaaauuuuaaucaauccuucucugaa

SEQ ID NO: 4201927 - RNA, 77 nt, Human
uucauauucccaaugucuagcugacacgguacuugguauauacaggacacucaguaaacgacaaugggauuaaugaa

SEQ ID NO: 4201928 - RNA, 93 nt, Human
uucauauucuuuucuauuacaauucugcaaggaguaugcaggcauuuccacuuuaguauucauguaaaauuggauagacucugaauaaaugaa

SEQ ID NO: 4201929 - RNA, 72 nt, Human
uucaucaagggcuuuaaguuuugagggaaaggacaucuuauuguccuuaaagaaugauaaugccaugaugga

SEQ ID NO: 4201930 - RNA, 101 nt, Human
uucaucacaucuauaaauuuauucuuuuuggggucaugugguagagaauuuuguucaccagaaguucuccaaaaagauuugaaaauuuguuagagugagaa

SEQ ID NO: 4201931 - RNA, 75 nt, Human
uucaucaggucuuuggagacaguggugucaaaguacaucccccccucuuucucccugucuccagggcugagugga

SEQ ID NO: 4201932 - RNA, 58 nt, Human
uucaucaucuacaaccaggaccacaaacuagggugccuacaugggugagacuggugaa

SEQ ID NO: 4201933 - RNA, 61 nt, Human
uucaucauugccagucuuuaaagaaacuuaaagugcaugcucuccuggcagugagacugaa

SEQ ID NO: 4201934 - RNA, 68 nt, Human
uucauccuguccugagauaaagaugaggaaagucuagcccuucucauaguuuauuuuaggaugaugaa

SEQ ID NO: 4201935 - RNA, 87 nt, Human
uucauccuucaggugcugugaaucuucauaaacuuuaaacaaaaacuuauuuuaugcugagauuucauggcauucuuaagaauagaa

SEQ ID NO: 4201936 - RNA, 55 nt, Human
uucaucuagagguucuggccgugcaugcugaguacugcacaggacaucugaugga

SEQ ID NO: 4201937 - RNA, 85 nt, Human
uucaucuuuaaaaagaccuacgauuuugguucuaauguaauccaaauauuacagaugaaaaagcuuguggauauuuauagaugaa

SEQ ID NO: 4201938 - RNA, 93 nt, Human
uucaugcaaaaauuccauuuuccagucuucuugcagcuacauguggucaaauuaccucauuuagagaauaagacauaaauggaauuucaugga

SEQ ID NO: 4201939 - RNA, 57 nt, Human
uucaugccaccuuuuaagugaagcauaaacauuugugucugcagaagauggcauggg

SEQ ID NO: 4201940 - RNA, 65 nt, Human
uucaugcguucacaagacguuuacugagugcccuuuuuucggcaggucccauugugaggcuugaa

SEQ ID NO: 4201941 - RNA, 57 nt, Human
uucaugugauaaaugugugacuaguacuuacauuucuggucauuuguuuugcaugaa

SEQ ID NO: 4201942 - RNA, 76 nt, Human
uucauguguuaacauccuaacccccaguguuauaguauuaggagguggggccuuugggaaauaguuaagacaugag

SEQ ID NO: 4201943 - RNA, 75 nt, Human
uucauuacagacuuacaaggucauaugugguuaguauuccccacuacaugaaaauaaguuugaaaauuuagugag

SEQ ID NO: 4201944 - RNA, 97 nt, Human
uucauuacucuuuuuauguuucugucuuuuuuauuauuuuggaguaauaaauauuuauuuguucuuaugaugaagcacugauucauagauugaugaa

SEQ ID NO: 4201945 - RNA, 74 nt, Human
uucauuaguuaaaagauaauuuuggacuaugucugguuguauguccaaauauucggucuuucugauuuuaugag

SEQ ID NO: 4201946 - RNA, 65 nt, Human
uucauuaguucugaagaugucuuagagccacauguccacuuaaagauuauuuccagacuaaugaa

SEQ ID NO: 4201947 - RNA, 59 nt, Human
uucauucaacaaguaguacacacaguaucuacugugugucaggcacaguugcugauggg

SEQ ID NO: 4201948 - RNA, 67 nt, Human
uucauucaacaaguguucguaaagugccugcaauaugccagccacucuacuaagcauuugagaugga

SEQ ID NO: 4201949 - RNA, 66 nt, Human
uucauucagugcauuugggagaguccugagcauccaggcaggacaugaugagugcaauugaaugag

SEQ ID NO: 4201950 - RNA, 64 nt, Human
uucauucaucccacaaacaugcuuugaacaugcacauuauguuucauaugguguggaugaagaa

SEQ ID NO: 4201951 - RNA, 57 nt, Human
uucauucauuacgugccaggcacuauucuaaguaagugcucggcauaugugagugaa

SEQ ID NO: 4201952 - RNA, 66 nt, Human
uucauuccuauuccuauuucuaaacauauggcacucaucuucuugccauuauagggaagggaagaa

SEQ ID NO: 4201953 - RNA, 69 nt, Human
uucauucuacauucuucauggcagagggccacccuguaggaccaccucacccagaggacuguuaaugaa

SEQ ID NO: 4201954 - RNA, 65 nt, Human
uucaacacuguuuggcugaguaacagugcaaagacacuuuuuauagcaaauaaaacaguauugaa

SEQ ID NO: 4201955 - RNA, 68 nt, Human
uucaacauaugaauuuuggguggacacgauucagucccuaccaccagcucaaaauucuuucuguugga

SEQ ID NO: 4201956 - RNA, 76 nt, Human
uucaacuacuuuuuuggggugcuuucaaagcaaagggggugucugugcuuugcaggaacccuaagcauggguugaa

SEQ ID NO: 4201957 - RNA, 66 nt, Human
uucaacucuucaagaucacaucuauugaauugcaguagaucuugugcaccuggucuuaagauugaa

SEQ ID NO: 4201958 - RNA, 56 nt, Human
uucaagacuccaagaaauuagugcccucuaaaauagcaguugaguggagucaugag

SEQ ID NO: 4201959 - RNA, 88 nt, Human
uucaagacuucggaugaagaacuuuagggcagaauuuagaagaaacuaaguugacuuuuaguucuuacuuuggcuuuuuggucaugaa

SEQ ID NO: 4201960 - RNA, 106 nt, Human
uucaagaucauuauuagagaaauccuuagacucucaauugaaguuacuaucuaugaaaagauucuuucagagaugucuagccuauuuucuaaugaggaccuuagaa

SEQ ID NO: 4201961 - RNA, 58 nt, Human
uucaagaugcacucggagaauugucaggguuuccugacagauuagaugugcauaugaa

SEQ ID NO: 4201962 - RNA, 64 nt, Human
uucaagucuuccaugguauucugauguuucucagcaaauuaaggaaugccucuggagucuuggg

SEQ ID NO: 4201963 - RNA, 112 nt, Human
uucaaguugaucuaucaccucuuuggcucuauuacugacuucuguauuuaacuuauucacuacuaguguuaucacaguguaaguacuagaaguaaagagagaaagacuagag

SEQ ID NO: 4201964 - RNA, 75 nt, Human
uucaaguugcucgcugacucaacaagcuucucauuuauuaggugccuacgagguccauggcagcggguacuugaa

SEQ ID NO: 4201965 - RNA, 82 nt, Human
uucaauaggugucucuguguccuccagggagauguaaaauccucuucacaucucccuggaggacacagagacacccauugga

SEQ ID NO: 4201966 - RNA, 65 nt, Human
uucaauaucauuguuuagucucaugcuuuuggauaccagaauguuuacuaaaaaugauguuugag

SEQ ID NO: 4201967 - RNA, 67 nt, Human
uucaaugaucccaugaugacagagucaucauuugaaaaagauucuauuacaugguuuaucauaugga

SEQ ID NO: 4201968 - RNA, 62 nt, Human
uucaaugcucaguccuaccuuggcucccauuaaacauuuggugcucuguggauugaguugaa

SEQ ID NO: 4201969 - RNA, 72 nt, Human
uucaauguuaagaagaauauguuaugauaagagguuccuaaagaaagcauuucauaguucucuggcauugaa

SEQ ID NO: 4201970 - RNA, 69 nt, Human
uucaauuuaauuuaagaacacuguuguguacugugugaagugccucagguaaaacuugaguuuauugag

SEQ ID NO: 4201971 - RNA, 81 nt, Human
uucaauuuuuugugacagaaagauuaagucccacguuggguacaacuuaaaaagaaucuuuucacgguacagaaagaugaa

SEQ ID NO: 4201972 - RNA, 77 nt, Human
uucacaacacauugccagagaucagcagggggaaaauaugcacaacacaauucugcauucagguaaaguguacugaa

SEQ ID NO: 4201973 - RNA, 62 nt, Human
uucacaagagggcagccaacugauccuacuaaaacuuagaucauuucaguccucugugugag

SEQ ID NO: 4201974 - RNA, 65 nt, Human
uucacagaagaggucacauuucccucuuuacagcacuagcagaauuguauaccucuuccuguggg

SEQ ID NO: 4201975 - RNA, 74 nt, Human
uucacagaaguguguauaacucuucaaaaauacagaaguauauacccuuaggaguguauacucaccucugugag

SEQ ID NO: 4201976 - RNA, 70 nt, Human
uggcagauggagauaaauggaacuuacuuuuuccaccuggugccagucccgcuuacucucuaugcugcca

SEQ ID NO: 4201977 - RNA, 57 nt, Human
uggcagcaucugaagugaauugcuuuuuggaaagagggggagucuuugaugucgcca

SEQ ID NO: 4201978 - RNA, 55 nt, Human
uggcagccaucagagcagggguggacagcccagcucuccugcuccagugcugcca

SEQ ID NO: 4201979 - RNA, 55 nt, Human
uggcagccguguugaacuugagccaagcguuuaguccucagcugaacugcugcca

SEQ ID NO: 4201980 - RNA, 72 nt, Human
uggcagcucugggggaggccuggccuccaggagaugcuccucccugaggcuggcccuuccaucccgcagcca

SEQ ID NO: 4201981 - RNA, 61 nt, Human
uggcagcucuguucaacaugaggcaguguuacaccauuguauuagucagcuugggcugcca

SEQ ID NO: 4201982 - RNA, 81 nt, Human
uggcaggcauccagcaggacguccaagugcuaucuuccaaacucuagacuagucuuccacuucuaugcgagugucguguca

SEQ ID NO: 4201983 - RNA, 63 nt, Human
uggcaggcucgggcgggggcgcggcgcggggacugaccgcccuccucugccccggggcugcua

SEQ ID NO: 4201984 - RNA, 62 nt, Human
uggcagggugggcuucagccccaccaguagcuaaggucccgguuccaagcccacccguguca

SEQ ID NO: 4201985 - RNA, 64 nt, Human
uggcagguccacucacagaucuaggucuuucacaaguucuggccuuugucuggaguggccuuca

SEQ ID NO: 4201986 - RNA, 58 nt, Human
uggcaggugcacuuuugguuucugugauuacagugaugagcaagaguguaccuggcca

SEQ ID NO: 4201987 - RNA, 60 nt, Human
uggcagguggacgugcuaaagcuugcagagaauucgugaagcacagcauauccaauguca

SEQ ID NO: 4201988 - RNA, 66 nt, Human
uggcagucuuucccuugagcucugcaaaugcagcaaaguacugagcucaaagggaagauucagcca

SEQ ID NO: 4201989 - RNA, 63 nt, Human
uggcaguggcccuaacaccguuucucaggauuccuuugaacgguaagugccauucaagagcca

SEQ ID NO: 4201990 - RNA, 62 nt, Human
uggcaguguugugccacauucccaccuugcaacaaucacguggaacugaguggcagcugcca

SEQ ID NO: 4201991 - RNA, 77 nt, Human
uggcaguucagguuggacucuuucgcgggccaggggcgggagaggccagucuuuuguaauguuugccugagcuacua

SEQ ID NO: 4201992 - RNA, 117 nt, Human
uggcaguugcuuauauucuuguauuuauuugcccacucaugcuuuugauaaauacacagggagugcuuaucaagugccaggugugguucuagguacugugaacacagcaacaaacca

SEQ ID NO: 4201993 - RNA, 74 nt, Human
uggcaguuucuuaagucacuggacuugccuagauuggauuuagcguaacacaugagcuuauuuggaaaaugcca

SEQ ID NO: 4201994 - RNA, 62 nt, Human
uggcauagguaucaaggauaaagcuguuuuauucauuucaacuaccuuugucaccaaugcca

SEQ ID NO: 4201995 - RNA, 95 nt, Human
uggcauauccgauucagaauggcaguguuuguguucucacauguggaacaggcuuuuuacaucaucagaagaaaugcugucaaaugguuaugcca

SEQ ID NO: 4201996 - RNA, 86 nt, Human
uggcaucccucagaaucagagcugaguagaggcaaacuggugcagaagcauuuccugugucucuauuuauguguucagggauucca

SEQ ID NO: 4201997 - RNA, 59 nt, Human
uggcaucuguguugcgguugucacuugguaacaagauaaguacuucgacagagguguua

SEQ ID NO: 4201998 - RNA, 67 nt, Human
uggcaugagggcauuuacagaaaugcuggcggaacugcugccagggaggcuguaggguccucuggca

SEQ ID NO: 4201999 - RNA, 74 nt, Human
uggcaugagguuuuaaucaucuccgaaaaaagaguagguaagcuuccugcuggaaaugaaagaacuaaauguca

SEQ ID NO: 4202000 - RNA, 64 nt, Human
uggcauguccucuguucuugcucugccuucuguuggcucagggacguuagaggacagguugcca

SEQ ID NO: 4202001 - RNA, 69 nt, Human
uggcauguggcuuugagucaucugauuggaugcauuccccucacauuuugaacccagagcucaugacca

SEQ ID NO: 4202002 - RNA, 94 nt, Human
uggcauuauuuucuuauuugaaaagaagguuacguuaaugaaauguuaguugauuguuacauuguuuucagauaacaugacuuuuguaauguua

SEQ ID NO: 4202003 - RNA, 72 nt, Human
uggcauucugcaaggggagaauuagaagcuaggugcugccaguugaaugaaucauucuauguauaugugcca

SEQ ID NO: 4202004 - RNA, 72 nt, Human
uggcauuguauucaguuacaggucuucuuuguagacuuuaaaaacacaagcuugccaagugaauacaagcca

SEQ ID NO: 4202005 - RNA, 65 nt, Human
uggcauuuagagaaaugaaggauuuaauuuccagcaaacgauucuuguuuccucccaaaaugcca

SEQ ID NO: 4202006 - RNA, 55 nt, Human
uggcauuuauuacuauugccgugggguuuccaugggccaguucuguugaaagcca

SEQ ID NO: 4202007 - RNA, 69 nt, Human
uggccaaagguacuuguuccugcaucuuccauacagcagguauauggucaggguuccagguaucuucca

SEQ ID NO: 4202008 - RNA, 63 nt, Human
uggccagcucagucuccaucagggauuuggguuuagucaccuuggagaccugggucugugcca

SEQ ID NO: 4202009 - RNA, 70 nt, Human
uggccaggauggucuucauuuggcucucccaccuuccugucauggagggcuaugaaaccauacuugggca

SEQ ID NO: 4202010 - RNA, 95 nt, Human
uggccaggccagucucgaacuccugaccucgugauccgcccaccucagccuccuaaagugcugggauuacaggcaugagccacugugccuggcca

SEQ ID NO: 4202011 - RNA, 75 nt, Human
uggccaggggcaguguaacaaccugaggauaucuggcaaaggucacucucaggaagugauauugagaccugacua

SEQ ID NO: 4202012 - RNA, 87 nt, Human
uggccaguuacgcagccucuccgagccacugccucucuguggaaggagggccugaggcugacggggagcagccgccucgcuuggcca

SEQ ID NO: 4202013 - RNA, 94 nt, Human
uggccaguucguuucuuaaacaucuauuuuaaaaggacuggguguugauacaguuuuuccaggguuagauguuuaugacuuuauggauuugucg

SEQ ID NO: 4202014 - RNA, 70 nt, Human
uggccaucaauugccacccagaccuugaagccacucugcuugucucuagggcaaugugaacuccuggcca

SEQ ID NO: 4202015 - RNA, 128 nt, Human
uggccaugagcagggcuggguauccugggcugugcagggaguggguuuggccuaggccccaaggagugggggccaggcgaugaccccuccacucuccaggacacccaugcucucugugcagugggcca

SEQ ID NO: 4202016 - RNA, 56 nt, Human
uggccaugggauagugcagggguguguggcaggcuagugucauuguccugaggccg

SEQ ID NO: 4202017 - RNA, 57 nt, Human
uggccauuccucacuauauuucacagggcacacgcugaugaaggagggggauggcca

SEQ ID NO: 4202018 - RNA, 71 nt, Human
uggcccacuucugagauuaagcagagauggaaauaaaacuuucccuuuccugacugaucucauuauagcca

SEQ ID NO: 4202019 - RNA, 91 nt, Human
uggcccagggagugucuggugcugugcaggacaaagggucaauccacaaauuugucccuuaccugauugcuggcauccaacacucaugcca

SEQ ID NO: 4202020 - RNA, 67 nt, Human
uucauucucauaaguguugcaguuaguauaagaaauuaugugcucacccuauuuauggaagagugaa

SEQ ID NO: 4202021 - RNA, 70 nt, Human
uucauucugggcucuaaggaacugggguggccgguugggcagguggguuucuuggggcccagaaucugaa

SEQ ID NO: 4202022 - RNA, 74 nt, Human
uucauugcaaacuccuggguuccggagauucugcuuuaauagguaggguugaggcccaggaauuugcacaugag

SEQ ID NO: 4202023 - RNA, 74 nt, Human
uucauugcagaauuuggccucaccaugcgugagucagaacaagcgccuugaaggccagggauuugcagccugag

SEQ ID NO: 4202024 - RNA, 67 nt, Human
uucauugcugcauuauuuagguuggccacaaaaagagagaccacaaucuaaauguccagcaauagaa

SEQ ID NO: 4202025 - RNA, 70 nt, Human
uucauuuaacagacguuuaccuagggccugcucugucuaaagucacaggcacuggggaugcugggaugaa

SEQ ID NO: 4202026 - RNA, 87 nt, Human
uucauuuacauucuuccucaaaugcaggucauaaccugaguuugagaugcagggaaugaccugcguuuuagagaagaggaaagugag

SEQ ID NO: 4202027 - RNA, 60 nt, Human
uucauuuauucagcagguauuuacugagcaccuucuaagugccaagccuguugaaaugaa

SEQ ID NO: 4202028 - RNA, 56 nt, Human
uucauuuauuguagucuuaguauucccaugggcagaacugagaccaauaaguagaa

SEQ ID NO: 4202029 - RNA, 80 nt, Human
uucauuucccagacagccaaugccugcagcccagugugcaucuuuucacauacugcugagcauuugcagggacagaugaa

SEQ ID NO: 4202030 - RNA, 98 nt, Human
uucauuucuagguauguuucuguguuggggugaggcauauccgccaauggcuccugagaaacggcuuccuucugaagcauagaagcaacuuauaugaa

SEQ ID NO: 4202031 - RNA, 92 nt, Human
uucauuucuguuuaaaguucuggaagcugcauaacuagcguggacugacugcugugucauugugcugugccuuugaacccuggcugagugag

SEQ ID NO: 4202032 - RNA, 62 nt, Human
uucauuuugagggaaccucuuacauaggacauccuauccaugcaagaguuucucaaacugga

SEQ ID NO: 4202033 - RNA, 77 nt, Human
uucauuuugguuggaauuaggcaggugguaccugaagcccuucuacauacauuuguucugauuucaaaaggaaugag

SEQ ID NO: 4202034 - RNA, 77 nt, Human
uucauuuuuccaaauuagaaguagagagggaaauuugagguaugaaauuaaaauagucucacuucuagaaagaugga

SEQ ID NO: 4202035 - RNA, 85 nt, Human
uuccaaaccugaaauauagaugugaacaguguguaccaguuuaacgcuuucacuucauuuguguuuuuuaauuaaggauuuagaa

SEQ ID NO: 4202036 - RNA, 80 nt, Human
uuccaacauggcucaugagagauuuggggauuuauuuaaccgccuuuauccaggcaaaucuccuagugaccuuguuggga

SEQ ID NO: 4202037 - RNA, 81 nt, Human
uuccaacuguuauucucaauaauucguguuucuuugguacaaagaguacuguaaaaugcaguugguggggauaugcuggag

SEQ ID NO: 4202038 - RNA, 55 nt, Human
uuccaagcauggucuacugcggggccugugcucuggcaguccccugugccuggaa

SEQ ID NO: 4202039 - RNA, 60 nt, Human
uuccaagugucagaucagauuuuuagacugaaguuucuaaagucugcacagauaccggaa

SEQ ID NO: 4202040 - RNA, 59 nt, Human
uuccaauauuuacaaugcauuaugaaguuauggaauucaggagugcuuaaguguuggaa

SEQ ID NO: 4202041 - RNA, 98 nt, Human
uuccaauuacacugcauuguaacaacauuugauuuuuagaaacuauugagcuuuggaauuccuguuguuucgucaguguuuguaaguaguuuauggaa

SEQ ID NO: 4202042 - RNA, 75 nt, Human
uuccaauuuggagaguaauuccaauauaaaucacuguuauggagugcuagguuguggauuacuacccuuuuggaa

SEQ ID NO: 4202043 - RNA, 92 nt, Human
uuccacagcaaccaacgcuggcugccaauuucagagcugccccugggccuggcucugcuggauugaggccaggagugccugggucugaggaa

SEQ ID NO: 4202044 - RNA, 66 nt, Human
uuccacagguguucuugcagugaaaaugaaaauuuuaaccugucaauuugcaugcuuuuugugggg

SEQ ID NO: 4202045 - RNA, 57 nt, Human
uuccacaucucucagcuuccagugcccagcacugugacccagagcaggugccaggaa

SEQ ID NO: 4202046 - RNA, 56 nt, Human
uuccacauuugaucaguguuuuacugugaagaucagugcugaaaucaaauuuggaa

SEQ ID NO: 4202047 - RNA, 73 nt, Human
uuccaccuccuggggcugaggucgccaagcgugcugcgugcagcugcugagcccuggcacaggugggcuggaa

SEQ ID NO: 4202048 - RNA, 66 nt, Human
uuccacuggcaaacugaagucacaaugucuuuucuguucguggugauuuccagugagucaguggga

SEQ ID NO: 4202049 - RNA, 79 nt, Human
uuccacugguaaauccaagaaguuucguuaaauguucucugugaggaccuuuuuaauucuuguauucuauucaguggga

SEQ ID NO: 4202050 - RNA, 56 nt, Human
uuccacugguauuugaaaauagauguuuaauauuuauuuagugguggcagugagaa

SEQ ID NO: 4202051 - RNA, 77 nt, Human
uuccacuuauaugaguuaucuaaaauagucaaauucauagaaucaaagaguuggauugugguuaccaguggguggag

SEQ ID NO: 4202052 - RNA, 57 nt, Human
uucuaccagcuacucacugauagguaaaguucaaugaguucauuuguggugguggaa

SEQ ID NO: 4202053 - RNA, 62 nt, Human
uucuagaacaggcaaaaccaaucaauagugacaaagccgaucacugguugccuggacugggg

SEQ ID NO: 4202054 - RNA, 104 nt, Human
uucuagacuuuuaaagcccaauucagcaauuauuuuaaggagaggucaaacaagcaggcugaagcuacaaaagauuauugcuguuuugguuaaagcagcuagga

SEQ ID NO: 4202055 - RNA, 58 nt, Human
uucuagauuuggggcaugaaguucugccacuaaggcauaaccaguacccaaguaggaa

SEQ ID NO: 4202056 - RNA, 80 nt, Human
uucuagcuaacgauuucuuucucuugauauuuuuuagagaaauaugaaacgcaaugggagcagaaauuguuugaauagga

SEQ ID NO: 4202057 - RNA, 57 nt, Human
uucuagcucauggugacagaucuguuucaagggucugucacagugcacagcuaagaa

SEQ ID NO: 4202058 - RNA, 58 nt, Human
uucuagcuguggucgagugaggaaaucaucaaaucaucuuccuuaaaagcagcuauaa

SEQ ID NO: 4202059 - RNA, 66 nt, Human
uucuaggggucagugaccauugaggauguggacacaaucuuuacuaagagguccuggcccagagga

SEQ ID NO: 4202060 - RNA, 79 nt, Human
uucuagguaaaauugcauucaggaugcaggaagguacaaaaauacuucuaggggauuuccuaaaugcgguuauugagaa

SEQ ID NO: 4202061 - RNA, 85 nt, Human
uucuaguauuguuugaaaccuuuauuuaaaagugaaaaugggauucaacuuauucaaaguagaugaaguuucaacacccauagaa

SEQ ID NO: 4202062 - RNA, 84 nt, Human
uucuagucuagucagcauauuacuuuaaaaaaucuucauagagaugccauuuuuggagagugugcauagggacaagacucagaa

SEQ ID NO: 4202063 - RNA, 77 nt, Human
uucuagucucucaauguaaauuugcugcccaauguuuauagguaaacacaugcagguauacauguuccagagaagaa

SEQ ID NO: 4202064 - RNA, 61 nt, Human
uucuaguuacucuuaaaugcugccuucacaagguuaauuuggcuguuaauagugauuagaa

SEQ ID NO: 4202065 - RNA, 76 nt, Human
uucuauaguccuuauuucacuuaaacguaugagguggcaugagccuuuacuuuagaaggaaauaaguucuacagag

SEQ ID NO: 4202066 - RNA, 88 nt, Human
uucuaucaggaaagcucuugcaucuguuguauuggucugacuuggaugacaugacuaacccaggaggcaagagauuccaaagauggga

SEQ ID NO: 4202067 - RNA, 65 nt, Human
uucuaucucuucugcucauguuaagguaugagguuacuuugcaaacacuuaagaagagagaugaa

SEQ ID NO: 4202068 - RNA, 60 nt, Human
uucuaugccugagaagaagccgcaaaaagagagagguuucugcauguuucagagcuggga

SEQ ID NO: 4202069 - RNA, 91 nt, Human
uucuaugggcgcuguauauuucaucgcaguucaucuuucauauccugggaaguaugucaaaaucugcaugauaugugucguguuauaagga

SEQ ID NO: 4202070 - RNA, 57 nt, Human
uucuauguaccuagcguuguaucuauuuccuaaggugcaaugaaugguaugcuggaa

SEQ ID NO: 4202071 - RNA, 69 nt, Human
uucuauguagagcaggacuugagauguuaugauaaauguauaauuucucaaaaguggucuacuugagaa

SEQ ID NO: 4202072 - RNA, 57 nt, Human
uucuaugugcuggagaauauuuuuaugccauuuaaaaauaaacugaagcacagagag

SEQ ID NO: 4202073 - RNA, 57 nt, Human
uucucaaagaaagcugucauuacucucuguaauuuuucaaugaguuuucuuugagag

SEQ ID NO: 4202074 - RNA, 64 nt, Human
uucucaauuccacuucauugacaucaaguuaguagcuugaaaucagccauggugagagugagag

SEQ ID NO: 4202075 - RNA, 59 nt, Human
uucucacaauucuuguauuugcuaaaccaugaguuuagggaagauuccaauugggagaa

SEQ ID NO: 4202076 - RNA, 67 nt, Human
uucucacagcucuggaggcagggaaguccaagaucagggcaucagcagauucagagucuggugagga

SEQ ID NO: 4202077 - RNA, 66 nt, Human
uucucacauucacagaauggcaaguuauggucuaacugugcuuugccuggugugaaauagugggaa

SEQ ID NO: 4202078 - RNA, 66 nt, Human
uucucaccccuguggagcaugguggccagcaccaacgugggcacuguggaggcauggggaggagaa

SEQ ID NO: 4202079 - RNA, 55 nt, Human
uucucacuauauaguaagcuccaggaaaugaacagagcuugcaguguguggagaa

SEQ ID NO: 4202080 - RNA, 65 nt, Human
uucucacugccuuuggugggaacacucugucaacagcaguggcugaagcaucaaaggcaagagga

SEQ ID NO: 4202081 - RNA, 129 nt, Human
uucucagaauuacuaucuaggauauagacagagcagagaaauccaaaucuucacacauaacauacccacuuacuuauaucuuaucaucuaggcuuggguuuuuuugccuagguagaauauuuuucagag

SEQ ID NO: 4202082 - RNA, 91 nt, Human
uucucagagcugccagaaacaucaucugaggguuugggcaucagcucugccuggcugguguucaggcccucagucacuuuggaagugagaa

SEQ ID NO: 4202083 - RNA, 63 nt, Human
uucucagauauuuguauggaacucuuagacaucagaaagagcuacaacgaagguaucugagga

SEQ ID NO: 4202084 - RNA, 69 nt, Human
uucucagccuacuucauuaucaagcuauacuauuuuauuuaugcaguuugaugaucuuacggcagagga

SEQ ID NO: 4202085 - RNA, 74 nt, Human
uucucagccucugcuugggcuccuagcuccaggaggggggucagugacaugcucucaggcauaaaggcugagaa

SEQ ID NO: 4202086 - RNA, 63 nt, Human
uucucagcugaguccuaccaauaaagaucuacucuucauuugaguacaaacucagccugagag

SEQ ID NO: 4202087 - RNA, 91 nt, Human
uucucagguuggcucuguuccuauguuugggcagacauuaauuuaaucagagcuagaaucugccugcagcaaagacucagcagcuugggaa

SEQ ID NO: 4202088 - RNA, 62 nt, Human
uucucauccuucagugcaguuaaucgcuacacaagaugacgcugccugucccaggaugagga

SEQ ID NO: 4202089 - RNA, 55 nt, Human
uucucaugucccaguaaagcuuggaaacaacaucacuaucacugggcacugagga

SEQ ID NO: 4202090 - RNA, 56 nt, Human
uucucauucugacucaguguaggccacaccauuugcaagccuguuuagaaugagag

SEQ ID NO: 4202091 - RNA, 62 nt, Human
uucuccagacccuccugcagacccugauaggucaggaccuccugcacugggggcucugggag

SEQ ID NO: 4202092 - RNA, 104 nt, Human
uucuccaugggacaguuaaauaaugcaagcauggaauacuccaggaugucaaaguggauagagaucagugugaguaccaugcucagggaugacuccauggugaa

SEQ ID NO: 4202093 - RNA, 68 nt, Human
uucucccucucaguucuugcuuaggcaacucucugcaguccccuuggcaguggagugaggugggagag

SEQ ID NO: 4202094 - RNA, 62 nt, Human
uucucccuuuuagcuuccagucggguugcccagugggcagugcuggaggcuggagggaagga

SEQ ID NO: 4202095 - RNA, 67 nt, Human
uucuccgaggcacccugagguucacuuccagacacagaugucuuuuauuucauggugcuuuuaagaa

SEQ ID NO: 4202096 - RNA, 68 nt, Human
uucuccggguggcggcgaagggaccgccgcucauccugccugcaucccuccgccgccugccuggagaa

SEQ ID NO: 4202097 - RNA, 79 nt, Human
uucuccuagaauugcauucuaugaauauaauauuuuguugaguaguuagucaaauuaaaugcaguuuucaaaaggggaa

SEQ ID NO: 4202098 - RNA, 71 nt, Human
uucuccugagcaggcagccuaggaagugaagaaccaaagccucuguauagccugagcugcuugccagggaa

SEQ ID NO: 4202099 - RNA, 60 nt, Human
uucuccugaguguguuaaaacaaaacucuauuaccuuugucaacaaaacuuucaggagaa

SEQ ID NO: 4202100 - RNA, 66 nt, Human
uucucuaaacucuaguaaaauguauucaggcaggaccucaaucaauaacccuggaguugaagagaa

SEQ ID NO: 4202101 - RNA, 60 nt, Human
uucucuaaagaguuaggccaagauguauuugacacauaauaugcuagacauuuuggagaa

SEQ ID NO: 4202102 - RNA, 117 nt, Human
uucucuaaauuaacccucccagcagcacuugagagaggauuguuauucccauuuuauaaauuagaggggagaggugagcaacuucugucaaggucacacugccaaugaguagcagaa

SEQ ID NO: 4202103 - RNA, 71 nt, Human
uucucuaagagaugcagaaguuaaguaaauaaaccaguacgauacagagcugucauuucuauuauagagga

SEQ ID NO: 4202104 - RNA, 64 nt, Human
uucucuaagcuggcugaggucuaugaccccagauuggguccuggccuggacaccagcaagagga

SEQ ID NO: 4202105 - RNA, 74 nt, Human
uucucuagaggagggaugugguuguugggugaugcucucagagcacaagaauaaccauauuuaaucucagugga

SEQ ID NO: 4202106 - RNA, 73 nt, Human
uucucuauacuugaggcccaggaauacacagaaauaugagauccucagggguuucagguguacaugaagagaa

SEQ ID NO: 4202107 - RNA, 63 nt, Human
uucucuauggcaucaggggaugaagcuggucugcaggaagcugccauccgaggugucagagaa

SEQ ID NO: 4202108 - RNA, 82 nt, Human
uucucucuccgguacuuuaagacuccaguagcaaaucuuaauguugugcuuugggugugaaguguuugcugcaguaagagga

SEQ ID NO: 4202109 - RNA, 75 nt, Human
uucucucugcuccaaaguggggcugaccaacuagguuggugaccuggcugcuuucacuauggaguucuaggagga

SEQ ID NO: 4202110 - RNA, 97 nt, Human
uucucucuguguauguguguguguguguguguguguguggguguggguguggguguacacaaggacauguauauuuaugacuauauggaggagggag

SEQ ID NO: 4202111 - RNA, 129 nt, Human
uucucucuugucaaugcugaugacauccaugaauccagcaggguagguuguaucaguucaaaccuugccaucgaucuuaaugaacugcugcaugcaaaucuucuuuacuucaucuccugucagggcaua

SEQ ID NO: 4202112 - RNA, 129 nt, Human
uucucaacuagggacauguacuggggucaccugcagagcuuuucaaaauacaucugcuagggccauggccugggacugcauauuuugacgauuuuaugcaaaugauucuuaugcauaccuaauugagaa

SEQ ID NO: 4202113 - RNA, 69 nt, Human
uucucaagugagauggcccuggcauguagcucagauuccucagcuaaacagggccgucuccucugagga

SEQ ID NO: 4202114 - RNA, 59 nt, Human
uucucaauggcaacuuguugcuuggauucucaucagaagcaaauaauugucuuugaggg

SEQ ID NO: 4202115 - RNA, 69 nt, Human
uucucaauuugagaggcaugucuauuauuuagaaaauucugguuuagauuccucuacaauaaaugagaa

SEQ ID NO: 4202116 - RNA, 80 nt, Human
uucucacagggcagcaaguggugggagacuuugaccuagaccccuaaagcuuaucuugcauauuuguuaaucauguggaa

SEQ ID NO: 4202117 - RNA, 81 nt, Human
uucucaccucgucuucccuuguuccucccucaauucucagauccaccagugagacagaaaacauaggagacaggaaaagaa

SEQ ID NO: 4202118 - RNA, 68 nt, Human
uucucacggcuggguucugagaaagaguaauucaauagcaugcauuucaaaagauccagcugguagga

SEQ ID NO: 4202119 - RNA, 98 nt, Human
uucucacugauauuucuccaaugcuuaggaaaguuugagguguauucauaagcucugccaaacuuuuuuagguucauaggcauaaucuuuaguaugaa

SEQ ID NO: 4202120 - RNA, 57 nt, Human
uucucagcccugaugaguaggcaauacuucuaagggugcugcuccaggagcugggga

SEQ ID NO: 4202121 - RNA, 93 nt, Human
uucucagccuccagaacuguaagaaauaaaauucuguuauuuauaagguauccaguuuauuuauuuguuauagcagccuggacagacugagaa

SEQ ID NO: 4202122 - RNA, 55 nt, Human
uucucaggaacucagugucagcuaucacaauaggcuggcaguggcuuccugagaa

SEQ ID NO: 4202123 - RNA, 57 nt, Human
uucucaggccccugccuggacuugcugaaucagaaacucuagggguggggcccagaa

SEQ ID NO: 4202124 - RNA, 68 nt, Human
uucucagggcaucucaugacccuuagagcaguguuugcagucugggugcacauuggagucacugggga

SEQ ID NO: 4202125 - RNA, 62 nt, Human
uucucagggcccuguguuagcuggcuucuagcugaguuuggcuaaugggaggcucugguggg

SEQ ID NO: 4202126 - RNA, 56 nt, Human
uucucaggguuggccucaaaucacuagacagaguccuugaauguuaguucugggga

SEQ ID NO: 4202127 - RNA, 58 nt, Human
uucucaguaugugacgaggaccaucaaaugaugauguucuacucuuaccaugcuagaa

SEQ ID NO: 4202128 - RNA, 84 nt, Human
uucugagcuuacuucuguacacagaugccaccaaugucaaguucuccaugauaauagccucuguguggggagguagagugugaa

SEQ ID NO: 4202129 - RNA, 57 nt, Human
uucugaggaugcagccaccuuccuauggugaguggagauggcugguuguccucugaa

SEQ ID NO: 4202130 - RNA, 130 nt, Human
uucugaugaagucuucuaucucagauuaaagacagucacuuuuucacuguguccucacacugcuuuuccucagugcacgugugcagagagagugaaagagaaagcucucugugucucuucuuaaaaggaa

SEQ ID NO: 4202131 - RNA, 63 nt, Human
uucugauucauucucaguuucuagaggaaaguauuuauuuucuaaggaugagacugaacagaa

SEQ ID NO: 4202132 - RNA, 103 nt, Human
uucugauugaugggccaucaguugcacaguuguugggcagugauugauuuuccaacccagcugcuccagcugugcugcagaugcgccuugucugaagucagag

SEQ ID NO: 4202133 - RNA, 67 nt, Human
uucugcaaaacucucccaagugcccuaugaugugccaguuagugucuuaggcacuggugaugcagag

SEQ ID NO: 4202134 - RNA, 85 nt, Human
uucugcagauugacaaagcccaucuuucugcuaaugacuuuagagucaaauaugagacagaacuggccuuucaucagucugugaa

SEQ ID NO: 4202135 - RNA, 78 nt, Human
uucugcagcaucauaucuucagugaagggaggcagguagaugcugcucccagaaaaaggaggcuaugaacuagcagaa

SEQ ID NO: 4202136 - RNA, 129 nt, Human
uucugcaugccccuuugggagauuugaagaugaggguuucaaugggaugaauguuaagcucugggucaagugggcccuggauuuacaucauucugacuucacaagucucugaggaaaaaagugcauuua

SEQ ID NO: 4202137 - RNA, 91 nt, Human
uucugcccuuacuuagcacgaacauuuacuuuccaaacaauuuacccaagugaggaaaugauuaaauauguuuauaugcuaaggggaagaa

SEQ ID NO: 4202138 - RNA, 58 nt, Human
uucugccugauguagucauaccucagaucccucuaggcagagcugcauucauguagaa

SEQ ID NO: 4202139 - RNA, 73 nt, Human
uucugcugcacuugagccugggagaaguuggcuccagaaauuuugccaucuaucuugccaucaaucgguagaa

SEQ ID NO: 4202140 - RNA, 65 nt, Human
uucugcugccuacuccuggggacuugaagguugaguuagaguccacccuaccuagacaguaagaa

SEQ ID NO: 4202141 - RNA, 58 nt, Human
uucugcuguacagaaaugcuucucucccagaauugaagcuucuaucucugcagaagga

SEQ ID NO: 4202142 - RNA, 115 nt, Human
uucugcuucuguuucuucacugugcuguagaggaaaucucacaagccgguaugggucagugaugcacuggccuaagauuguguuuuccugacagucagugguuaaauaugcagaa

SEQ ID NO: 4202143 - RNA, 129 nt, Human
uucuggaccagauauuguuuuuuaauuuucaauguuuauucuaggaaaacuccuuagcucauaaaagauuuaguguuaagagaaaauucugcuuugagagcuuugaaaaauauuuauuauuauccagaa

SEQ ID NO: 4202144 - RNA, 94 nt, Human
uucuggagccugcagagacaagggaucgucuugcaagcagagagagcagcccuccucagccagugccuugaucuugccuucccagccuucagaa

SEQ ID NO: 4202145 - RNA, 56 nt, Human
uucuggaguauuccuggcaccucccaucucccaaggcugccaggaauacuccagaa

SEQ ID NO: 4202146 - RNA, 56 nt, Human
uucuggaguauuccuggcagccuugggagaugggaggugccaggaauacuccagaa

SEQ ID NO: 4202147 - RNA, 65 nt, Human
uucuggccaccggucugguuugaauauaaacagugccuuucauuacaggcaguuugugguuaggg

SEQ ID NO: 4202148 - RNA, 74 nt, Human
uucuggccuaagguacagaauucugucccuugaguggacacugggaagagagaauucugucacuauccccagag

SEQ ID NO: 4202149 - RNA, 112 nt, Human
uucuggccugggguuaagccaguccucccucaccucagucugggccucaucaugccccucgcacaugacccagacccagagggaggcagguugcccuacccauuuuccagag

SEQ ID NO: 4202150 - RNA, 61 nt, Human
uucuggcuccacucugugcaugcuggaggacaauuuacagcagucaguaaggcagccagaa

SEQ ID NO: 4202151 - RNA, 75 nt, Human
uucuggcuccagaugcuucuguuagaaaugguaagaaauauacauuuaaauauauuugguuuuuggagauuaggg

SEQ ID NO: 4202152 - RNA, 57 nt, Human
uucuggcugggcagacagaaugcuuucaauuuagaccauggagcucccagcucagga

SEQ ID NO: 4202153 - RNA, 88 nt, Human
uucugggcagcacaagguauguuuuguuuggugucugguguguuaauacuaggaggcauauaaaacauucauuuaucugcugucagaa

SEQ ID NO: 4202154 - RNA, 68 nt, Human
uucugguaaaauguuacaugcucccacuuaggaccucuuuuuggauucaugcaggauuuaaccuagaa

SEQ ID NO: 4202155 - RNA, 117 nt, Human
uucuggugaaggaagugcucagggaacauuuacaguaaucgaguguuguggcagcaauaucccaugucacaguauagaguuauuuuggcaguuucgugagccuuucauuccucugaa

SEQ ID NO: 4202156 - RNA, 86 nt, Human
uucuguaaagccauagccaugcugcuaugcacagccaugcaauuugcacacugugacaaaagcagccugccuggggacagauagag

SEQ ID NO: 4202157 - RNA, 116 nt, Human
uucuguccuacccuccuacugcagaaagcucacuuccuggcagugcccagucacuguuccuagagcagcccuagggauugcuguuuucugcuaucuguggaagcccaaggacagaa

SEQ ID NO: 4202158 - RNA, 60 nt, Human
uucugucguguucacuguggccuaggacauugccuggccaacaguaggagcucgauugaa

SEQ ID NO: 4202159 - RNA, 56 nt, Human
uucugugaaacuaaagagaggaugauuaauucagccuagauguaggauucacagag

SEQ ID NO: 4202160 - RNA, 96 nt, Human
uucugugaauauuuuuguccguauguauaugaagcuaguauuuuuguguggagaguauuaaauuuacauugacagagagauuugaaguaagcagaa

SEQ ID NO: 4202161 - RNA, 97 nt, Human
uucugugaggacuauagaagggugugagacuguuauugcaauaguucacauuggugaugacagcauuuucuucuaaggagauagucagggagcaggg

SEQ ID NO: 4202162 - RNA, 68 nt, Human
uucuguggaaauugucagcuucuuucaguagaaaguccugcacuggaagccaguugacaaucacagaa

SEQ ID NO: 4202163 - RNA, 87 nt, Human
uucugugggcucaggagucagaggcauacucccagucuugcuuacaauugcagaaagguaugugugccuuuggcugugcccacagaa

SEQ ID NO: 4202164 - RNA, 130 nt, Human
uucugugucuuaccugaucuaugcaaucauucuuggauuuggcucuagugaaaaaugcaacguaaaguuaauuugaaauacucaagcugcaaucuaugaacuauucuuuacaagggacaagcccacagag

SEQ ID NO: 4202165 - RNA, 127 nt, Human
uucuguuaauguuacuuuucagcuuuaggggauucuaaguugggaugauuugaacuuauucaaauaaauccaaaucaucccaacugagaauccccuaaaggugaaauguugaaugugacauucagag

SEQ ID NO: 4202166 - RNA, 57 nt, Human
uucuguuagcauucugaucuccuucuuugggggauuucacacagaguguaaacagga

SEQ ID NO: 4202167 - RNA, 56 nt, Human
uucuguuaucauuaagcauuauuugacuugcaaaugucaguuauguuguaacagaa

SEQ ID NO: 4202168 - RNA, 65 nt, Human
uucuguuccuacuaccuggcugucauguuaccaacugaagcuauugguaaggaagugggaaagaa

SEQ ID NO: 4202169 - RNA, 67 nt, Human
uucuguugacauguuuauuggagauuggauuucuaagagaucauuuucacauuaauguuuagcagga

SEQ ID NO: 4202170 - RNA, 80 nt, Human
uucuguuucuguuuugggagggguguaugugagagaguuuuccuuccaugccuuacucuucaccgcuacugaaauacgaa

SEQ ID NO: 4202171 - RNA, 66 nt, Human
uucuguuucuucucgacaccuuaucccucgguucccgcuggggagaacacaugaguggaaacagga

SEQ ID NO: 4202172 - RNA, 66 nt, Human
uucuguuuggagucauccuaaugccuccagaagccugggagggcucaauugacuccugaggcagaa

SEQ ID NO: 4202173 - RNA, 60 nt, Human
uucuguuuucguagcagauugcaaaagcucugugugcuuagcauguguauggaaggggga

SEQ ID NO: 4202174 - RNA, 99 nt, Human
uuagcacaguuucugacauggaaaguacuccacaauuauuaacuauauuuaauuugacauauuuaugaagcauuuucuauguccugggagguguguuaa

SEQ ID NO: 4202175 - RNA, 72 nt, Human
uuagcacuuugauucaugcagauuaugugaaguuguuuccccuuuuguccugcauauauaaucauaggcuga

SEQ ID NO: 4202176 - RNA, 115 nt, Human
uuagccagguaugguggugcaggccuauaaucucagcuacuugggaggcugaggcacaagaaucgcuugagcugcagugagcugagauggugccacugcacuccagccuggguga

SEQ ID NO: 4202177 - RNA, 72 nt, Human
uuagcccuauucuaaguccuguaagauaaaauuuauauaauguacaagaggcuagggugagugcagggcuga

SEQ ID NO: 4202178 - RNA, 62 nt, Human
uuagccuuagaagcuuagcaaauggcuuuaaauauguuuuaauuugagcuuugaaggucuga

SEQ ID NO: 4202179 - RNA, 86 nt, Human
uuagcgcuuggcugccagcuuuuagugggcuuauuacuuccuuaaagagaaauagagagcuguuugaaagcaggcacaggaacuag

SEQ ID NO: 4202180 - RNA, 79 nt, Human
uuagcuacaucuugaagguucuaccauacauguucaucacuaaggcugcuguaugguagggguuuugagcuguuaauga

SEQ ID NO: 4202181 - RNA, 82 nt, Human
uuagcucaucaugcaguuuugccaccuaagagauuucuuuuacucccucucuuaagugucugucugacugcauuuguucuaa

SEQ ID NO: 4202182 - RNA, 129 nt, Human
uuagcuguuuuuuuuucaauuuaguacacccaagcauaaucaguaguagauuuauuagaugaccaaagaaguuuuaaaaaaugaugcucacagauuagugguggauucaaacaagguggaaacaaauga

SEQ ID NO: 4202183 - RNA, 57 nt, Human
uuagcuuguggugguacauuaggacuaaauauuccaaaugcauuaacauaaagcuga

SEQ ID NO: 4202184 - RNA, 66 nt, Human
uuaggaagaauauauuuagagcauggaagucuauuaacuuuuccucauuuuaaauguucuuuuuaa

SEQ ID NO: 4202185 - RNA, 63 nt, Human
uuaggaaggcacugggugccaaagucugucuuugaggucaggaucugcgccugugccuccuaa

SEQ ID NO: 4202186 - RNA, 75 nt, Human
uuaggaauuguuuucacuuguggaagcugagaaacagagauauucugagacuccauaaguugaaagauguucuga

SEQ ID NO: 4202187 - RNA, 107 nt, Human
uuaggacaguguuuaucucugggaagaaggucuuucuacauuuuauaugcuugcacuuucuuuggauaacauaguuguggaaaggaaacuuuucaguauugucuugg

SEQ ID NO: 4202188 - RNA, 57 nt, Human
uuaggagaucagagaggacucagucccauacucuguuuuguuucugcuauuuucuaa

SEQ ID NO: 4202189 - RNA, 60 nt, Human
uuaggaggaaaauuugagucacacaaaacaucucuuguagcauucauuuuugccuucuaa

SEQ ID NO: 4202190 - RNA, 56 nt, Human
uuaggccuaguuacugcuuacuucugaggcuugaggaguacagaauugggaccuaa

SEQ ID NO: 4202191 - RNA, 76 nt, Human
uuaggcuagcccuuaaauucuuaaugcccucauuuauaaagugagcauaacaacagaguuuagcucguugggcuga

SEQ ID NO: 4202192 - RNA, 64 nt, Human
uuaggguaacauguguguuauggauugaauuggguccucucaaauucacauguugaaguccuaa

SEQ ID NO: 4202193 - RNA, 67 nt, Human
uuaggguuuuucaaguaaugcuacuccuaugacuacuggguccuaggguaaauguauuugaaccuga

SEQ ID NO: 4202194 - RNA, 75 nt, Human
uuagguacuuaagaucucagcuaugcaaugagggucagcaacacuaaauguuagcagggauacaaggucgccuaa

SEQ ID NO: 4202195 - RNA, 78 nt, Human
uuagguauaacaucucauggacuacauucugcuucaauagaacuugcaggaaaauagacuugagaugguugcacuuag

SEQ ID NO: 4202196 - RNA, 79 nt, Human
uuagguugacgcaaaagcaauugugguuuuugucauuacuuucaaugcaaaaacugcaauugcuuuugcaccaacuuaa

SEQ ID NO: 4202197 - RNA, 80 nt, Human
uuagguuggugcaaauguaauugcaguuuucgacauuacuuuuaauggcaaaaaccacaguaacuuuugcaccaaccuaa

SEQ ID NO: 4202198 - RNA, 81 nt, Human
uuagguuugcuuacuucaguguuuuggacugugcugacauagagagucuacacacaaguuugggucacucagcuaacuuaa

SEQ ID NO: 4202199 - RNA, 65 nt, Human
uuauucacacaugaaucccuaguaccugcuauauaguaggugcucaaucauuauguaaugaauga

SEQ ID NO: 4202200 - RNA, 77 nt, Human
uuauucaccugaaucuuggacuucagaauagcaagcuaaggcuacuuugaagucaaagauugauuccaggaggguaa

SEQ ID NO: 4202201 - RNA, 63 nt, Human
uuauuccuuuuucugucugauuggauuagccaggacuuccaguacaauguugaaaaggaguga

SEQ ID NO: 4202202 - RNA, 87 nt, Human
uuauucuccuuaugccugaaaugucugaaagccaaucugcacugugaaggauggagauggcagagguuaugggcauaauggaaauaa

SEQ ID NO: 4202203 - RNA, 64 nt, Human
uuauucugaacuagacucucaucgcucucccaucucagaaaauguccaguuuacuucaggauga

SEQ ID NO: 4202204 - RNA, 75 nt, Human
uuauugaaaaggucacugaucaguugaguacagaugaaagguucuuagaguagaucaaugaccuguuguuaguga

SEQ ID NO: 4202205 - RNA, 77 nt, Human
uuauugcaccaugccucaguuucuacaguuguucaaagaaaauccacugcugauugggacuggcagggcugcggugg

SEQ ID NO: 4202206 - RNA, 56 nt, Human
uuauuguauuugauuaauuuuuuagauuuuuaaaaaagacuagucgagugcaguag

SEQ ID NO: 4202207 - RNA, 83 nt, Human
uuauuguguggaugcaugagugugugugagcacuuacauaucuggauguccaguuucuacacacauacaaguacacagaaugg

SEQ ID NO: 4202208 - RNA, 90 nt, Human
uuauuuaauccucacaacaaucucgugaaauggcuuugaucauuacuacuuuacagaugacagaacugggggcacagauaggauaaguaa

SEQ ID NO: 4202209 - RNA, 69 nt, Human
uuauuuaauuuucucacucagaggacaccugcuggcaaggaguaaacugauuugagcagaauaaaauag

SEQ ID NO: 4202210 - RNA, 68 nt, Human
uuauuuaggagaaggaacccuguuaacugagaaaauuaguauuguaagguucauuucuucccagauaa

SEQ ID NO: 4202211 - RNA, 84 nt, Human
uuauuuauaaugcagcccucaggaaccacauugcugcuuccauuggaguagggcuggggcuccugaagcuaacaucuugaauga

SEQ ID NO: 4202212 - RNA, 129 nt, Human
uuauuuauuauaguucauucauugugacaauguaccauaguaguaaaagaugcucuaaaaauuugaaaaagaaucuuuccucauugcugucaaguaucaugaugaaucuaaaaauuguaguuacaccua

SEQ ID NO: 4202213 - RNA, 86 nt, Human
uuauuuccaugagaucuucuagcagaaguaauuucggguuggugucuaucugaaagccuucugucuagcagauagcauugaagugg

SEQ ID NO: 4202214 - RNA, 59 nt, Human
uuauuuccuaaaucucuuuguuggguuaaguccauucugauauaagagaaguggaauga

SEQ ID NO: 4202215 - RNA, 56 nt, Human
uuauuucugagacuaaauucuuuaaauauaaauuauagaagucagcucagaaguga

SEQ ID NO: 4202216 - RNA, 69 nt, Human
uuauuugaggagaaugcgcaccacauauauguuucuuuuaauguaguagugguauuauuccuggaauaa

SEQ ID NO: 4202217 - RNA, 82 nt, Human
uuauuugagggcugugagggcuucugaggcauuggcgaaagcucugaugcaaagauuagaaaguuucacagcaugcauuuga

SEQ ID NO: 4202218 - RNA, 130 nt, Human
uuauuuguaaacauuuuuaaagauauuauucagaugagcauuggaacuuagguaaaauuuucaaaauugauauuuaacuggucccaauauauuuuuugaauuagaguauauauacaucacugacucuuaa

SEQ ID NO: 4202219 - RNA, 59 nt, Human
uuauuuguuuuccaucugggacuggcauucagagacccagagagguaaaacagccuuga

SEQ ID NO: 4202220 - RNA, 61 nt, Human
uuauuuuacuguuucccugcucucaagugcuuaagcauagacaggugaaacagcaagguaa

SEQ ID NO: 4202221 - RNA, 85 nt, Human
uuauuuuaggugguagaacaggguagagucaugucauuauuugcugguggaagacacuauuuaccagguguucuuugcugaauaa

SEQ ID NO: 4202222 - RNA, 59 nt, Human
uuauuuuagugauagaaaaaacuguggcugaaccaaguuuucugggaucacuggaauga

SEQ ID NO: 4202223 - RNA, 73 nt, Human
uuauuuucauagucauuuuuggcuggugaaaauuuuauuucacucauuugcaugaugugcuauguuaaaauaa

SEQ ID NO: 4202224 - RNA, 90 nt, Human
uuauuuucugucuuccuuccuagagcauaaacuccguuaagaucauucugaauguuucguaaauugucuaugggaggagagaggaaguaa

SEQ ID NO: 4202225 - RNA, 84 nt, Human
uuauuuuuguuauacaaagucacauugaaaugaaauggauacaugcaccauugacuuuaauaggauuuugcauuguaagaauaa

SEQ ID NO: 4202226 - RNA, 69 nt, Human
uucaaaaagauagcauugugcuccuuucuugguggagugaacaggugaggauuauacugucuuuaugga

SEQ ID NO: 4202227 - RNA, 59 nt, Human
uucaaaaagguauguucaaguccugacccccaguaccucugaauaugaccuuauuugga

SEQ ID NO: 4202228 - RNA, 83 nt, Human
uucaaaaguaguuuucaaagucaaugagauuguuuaaaagaguagguaccugacagucucuugcuugaauacuaucuagugag

SEQ ID NO: 4202229 - RNA, 76 nt, Human
uucaaaaucauugaguaaaaugaauacaauauuuaguuuaaauguauuguaaguuuuauuuacuagugagguugaa

SEQ ID NO: 4202230 - RNA, 94 nt, Human
uucaaaggacuuggacuggcagauaaacaugugauaaacagauaaaacaccucacuguccguccaucuuuuuaucguuggcaggugcucuugaa

SEQ ID NO: 4202231 - RNA, 88 nt, Human
uucaaaguagcauuuaguuugaaugauuucuucuucauccccugcuugguaugaaacagugaauuagucaaguaaaaaugucuuugga

SEQ ID NO: 4202232 - RNA, 57 nt, Human
ugggggcuccaggcuccagggaacuuuccuacauuaggagcuggggagcuggcccca

SEQ ID NO: 4202233 - RNA, 65 nt, Human
uggggggauaggagggagcacuauauggggagcaucagccugagcucugcucuugccuccccuca

SEQ ID NO: 4202234 - RNA, 77 nt, Human
uggggguagggauaaacagaguaguugcuacuggccucuagugggugguggccagagaugcuguuaaauaccccaca

SEQ ID NO: 4202235 - RNA, 80 nt, Human
ugggggugaggaaaagggcagaguucacuagaaagaaguaauaguccuucuguuacugaaagcugcccucucaaaaucca

SEQ ID NO: 4202236 - RNA, 80 nt, Human
ugggguaccaugugauguguugauuuaugcauauaauuugaaauaauuaaacugagcaaauuaacauauccaucaccuca

SEQ ID NO: 4202237 - RNA, 59 nt, Human
ugggguagguaugaaaacuaggguaauaagaugcuugauuguuuucagguuugccacca

SEQ ID NO: 4202238 - RNA, 74 nt, Human
uggggucacacugccugcucauaacauugcuauguggcuugagugacagcaggagagcagugcgugguccccca

SEQ ID NO: 4202239 - RNA, 79 nt, Human
uggggucaguaggaaccuagggucaaaaaaugggauacagucucccccuuuaugcaguugaucuuuucuugcugcccca

SEQ ID NO: 4202240 - RNA, 55 nt, Human
ugggguccugagcuagaaaauugaacuccuaguccaguuuucagcagaacaccca

SEQ ID NO: 4202241 - RNA, 60 nt, Human
uggggugggguuggggggcaaccacacuagauggugacauugcugcccucccuuuccuca

SEQ ID NO: 4202242 - RNA, 64 nt, Human
uggggugguguuugucucauaucagccuaucuuuucugccauugagauaauaaacaucuccuua

SEQ ID NO: 4202243 - RNA, 85 nt, Human
uggggugucgggaugggggugcugggagacacagaccugauacaguaugucuuucugcaccaccucacaauuuuccugaacccca

SEQ ID NO: 4202244 - RNA, 58 nt, Human
ugggguuccaaagcaaaggaggugagcccaucucagcucagagacuuuggaacaucca

SEQ ID NO: 4202245 - RNA, 82 nt, Human
ugggguuuuguuuguuuugggguuacggcaaacugaagaggugccaguuuguaaaauguggccuggaaauuaacuugccuca

SEQ ID NO: 4202246 - RNA, 93 nt, Human
uggguaaauggaggucaugauauucucuuuauuuuuguauagguuugaaauuuuacguaauauaagaaaguguggugaauagauauauacuua

SEQ ID NO: 4202247 - RNA, 64 nt, Human
uggguacagcuuggcgaauguagguauggacaagugagucugugugggcuaacaagcguaccca

SEQ ID NO: 4202248 - RNA, 57 nt, Human
uggguacuguggcauagccuuggcuccccuagucuaggcucugacccaugggaccca

SEQ ID NO: 4202249 - RNA, 130 nt, Human
uggguagacagacaggaagagaucaacauaguggguuuggcauacugacucaaauguaacuuuugcagacuggcucagugucaucacuuaauauaaaaugaucuucuuuauuguucuccaacccuuugca

SEQ ID NO: 4202250 - RNA, 56 nt, Human
uggguaguacgaggguuuguuucagauuccuugaaucagagcccugagucugcaca

SEQ ID NO: 4202251 - RNA, 128 nt, Human
ugggucacugugaccuuaaccugggcugguuuaaggcaugaguggguuuuagugaucgcccuucuguugggugaaguccacaggcugaggcccuucugcugcagcagccucguuagcaugauggccca

SEQ ID NO: 4202252 - RNA, 97 nt, Human
ugggucagaugaccuuguuagcgacuugacagacauguccuggaugcucuuuguucccaggaggcucucagguccucccccaggguccugucacuca

SEQ ID NO: 4202253 - RNA, 110 nt, Human
ugggucaggguaaguugcuggacagugggcagaggagacagguacuggcugagugaagcucagggcaaguuugacucuuccacugucucagccuccagacgaaugaccca

SEQ ID NO: 4202254 - RNA, 86 nt, Human
ugggucggguguggguucugcagaccaggugcggauucuguguagguucugcaggcccaguguagaggcucacaccuguaauccca

SEQ ID NO: 4202255 - RNA, 81 nt, Human
ugggucgguuagaaucacaugccagaacuuguaccaaucacugaagcuagagaaauggaguacugugcuguaauugaccca

SEQ ID NO: 4202256 - RNA, 97 nt, Human
ugggucugaaacacuucuuuaccaagagauagaguccucacugccugugcaagauucaucaccuugaguggaaguaucauuuccuguuucagacuca

SEQ ID NO: 4202257 - RNA, 66 nt, Human
ugggucuuaacaguguggaagagauuuuagggaaggacucuaacuugaacucaugacugugacuua

SEQ ID NO: 4202258 - RNA, 68 nt, Human
ugggucuugacuuccagccuucaaaucugaauagcauaucagaaaagaaguuugggauucaguuucca

SEQ ID NO: 4202259 - RNA, 60 nt, Human
ugggugaagaggcuaugcuacuguugcaucuaagggaauaguggcacuguuucuucccua

SEQ ID NO: 4202260 - RNA, 69 nt, Human
ugggugacauaguuacuucaggcucauaugccauuuucugggggccuuauaggagacuuugugagccca

SEQ ID NO: 4202261 - RNA, 130 nt, Human
ugggugcagcccuggguggcuggaagugggagucaggguuuucccggcagcucacagcccccaggggcagagcagggcacuggaaggcacugaucauauuucccugaugcuccccugagguuguagucaa

SEQ ID NO: 4202262 - RNA, 60 nt, Human
ugggugcaggaugagugcuggcugcugcuauugcaauguccagugcucccugcacgccca

SEQ ID NO: 4202263 - RNA, 66 nt, Human
ugggugcucugcgaccguagggagcaagucugccuuguucauuccugccucgcggcacagcaccca

SEQ ID NO: 4202264 - RNA, 97 nt, Human
ugggugcuugguucaucucugugggagucaggaaguauaaucagauucacaugggugaaagaggcugucuuuuugcuuucaagaugaacuacaccua

SEQ ID NO: 4202265 - RNA, 64 nt, Human
uggguggagagcaucccaaugauaagcauuauuuguuuggaucaaauuucaugcuguccuccca

SEQ ID NO: 4202266 - RNA, 56 nt, Human
uggguggcucuguugucaacugauauuaccauauccuuuuggcuaugagucagcua

SEQ ID NO: 4202267 - RNA, 62 nt, Human
uggguggcugcagagggcacagcauucagagucccaggagccagcuccuuuguagucggcca

SEQ ID NO: 4202268 - RNA, 89 nt, Human
ugggugggaauucuuuggcagggccagcugcagaauuagcauuaaugugauacuaaucccugggauggccccucagagcaguguaccca

SEQ ID NO: 4202269 - RNA, 59 nt, Human
ugggugggcgcucgcggggucccaucucuaaggaguaggcccagaguuaagcccaccca

SEQ ID NO: 4202270 - RNA, 77 nt, Human
ugggugggguuuguggugcaggcaguccaggugggcaucgucccagaugcucugcugguaccaguggccgucaccua

SEQ ID NO: 4202271 - RNA, 79 nt, Human
uggguuacaaugaugaauaaauggcauuaauuaaaugugcuauauaauuguucaucauuguuaauuaaaguuuuuccca

SEQ ID NO: 4202272 - RNA, 59 nt, Human
uugagggacagaggugcugucuaggaagucagauagcguuuuccaguucugucccucag

SEQ ID NO: 4202273 - RNA, 64 nt, Human
uugagggaugagugaguaaacaauauguggcaucuacauaugaugaaauauuauucacccucaa

SEQ ID NO: 4202274 - RNA, 92 nt, Human
uugagggugggguagggggaggccuuucugcaacagcagcugcucugucuuuaggcucugggcaaagaugccucaucccauccuuucagcaa

SEQ ID NO: 4202275 - RNA, 103 nt, Human
uugagguggagucucgcuguguccccgaggcuggagugcaguggcgcgaucuuggcucacugcaagcuccgccucccggguucacgccauucuccugccucag

SEQ ID NO: 4202276 - RNA, 80 nt, Human
uugagguugaacaagaccauagauaucgcagaagcaaucuuacuacagaauacuucuagauuuuuguaauuguuccccaa

SEQ ID NO: 4202277 - RNA, 76 nt, Human
uugagguuguuucaacaguagucucauuuucagauaaagaaaccgaggcuuaaagauaguaagaaaccuaccugaa

SEQ ID NO: 4202278 - RNA, 76 nt, Human
uugaguauucacuauggaguaaugaagaauucccuguaacccuuggguuguuucuaaguuacuguuauggucucaa

SEQ ID NO: 4202279 - RNA, 59 nt, Human
uugagucauuauuccaguguguugaacauuugcuauuaaaauacugggcagugacuuga

SEQ ID NO: 4202280 - RNA, 56 nt, Human
uugagucuccucagcagggcuauggccuccagauuucucugcuuuaggagagucag

SEQ ID NO: 4202281 - RNA, 76 nt, Human
uugagucuuguugcuggccccguccagaggaagcagccuuccugacucuguaccuggcauagcaaccuuagcuuaa

SEQ ID NO: 4202282 - RNA, 109 nt, Human
uugagugccaguacucugcucauaguagugggaaaugggggcggaggugggguugugcuuccacuguaaccauuaucaccauauuuuugguggagaaacugguguucag

SEQ ID NO: 4202283 - RNA, 77 nt, Human
uugaguguuuaucagacaagcccugcauggucagaaucucuucugcaugaagcugggguuuuucuaugguuauucag

SEQ ID NO: 4202284 - RNA, 71 nt, Human
uugaguucuuacaaguauuccagguccagauuccacccagauuuacugaacuagaagcuugaagagcucag

SEQ ID NO: 4202285 - RNA, 94 nt, Human
uugauagacaggugaguguucagccacuacccaccuuaacaggaucuucagggaaauuguuaggaggcuaguugagcaccaggcuguccauugg

SEQ ID NO: 4202286 - RNA, 107 nt, Human
uugauaggaaaggagugggacucugagacuuaggaugggaaaaucuggguagauucacuucagaauccugaguucucagagucuccugaaaucuuagguccuaugga

SEQ ID NO: 4202287 - RNA, 59 nt, Human
uugauauagcggccagaugugacuuugguuguuuucccuucauaugugguuguauacaa

SEQ ID NO: 4202288 - RNA, 73 nt, Human
uugaucaaucaagaauaaguuguaaagcugucugccaguauucucgguauuugcucaauuuaucuuggaucaa

SEQ ID NO: 4202289 - RNA, 76 nt, Human
uugaucagauguuugcuagaucuuuggcagguaaucauauuuguggaccacacucaucuauuagauaucuguucaa

SEQ ID NO: 4202290 - RNA, 77 nt, Human
uugaucaucugcccugcccaggccuugggcuuuaugccagcacagagcucaaaggccagguagcagcacauccucaa

SEQ ID NO: 4202291 - RNA, 64 nt, Human
uugaucauuuuagucuaauaaaaguggaguuuuauggcucauuuuaauuaggguggauaaucag

SEQ ID NO: 4202292 - RNA, 91 nt, Human
uugauccgguauuuucaguuucaaauccuggaugcacuagcagcaugaugauguguucauggaauuugcaauugagauaaugaggaaucaa

SEQ ID NO: 4202293 - RNA, 76 nt, Human
uugaucgccugguggaccagccuccccagccccucuggcagcugucugggaggccuccacuuacugaggcggacaa

SEQ ID NO: 4202294 - RNA, 62 nt, Human
uugaucggccauggaauaccuuuuucaagugcucuggaaaguuagguugcauuggucaucaa

SEQ ID NO: 4202295 - RNA, 60 nt, Human
uugaugaagggucaagaggguagcagacuuugggugcacaacacuucaauccuuuaucaa

SEQ ID NO: 4202296 - RNA, 58 nt, Human
uugaugagucugacuaguaacuuuggucaaccaaugacagguucaugacuccucucaa

SEQ ID NO: 4202297 - RNA, 69 nt, Human
uugaugauuauuuggccaagcaacuuccaaaaccuugguauuuggaauagcuugcuaauguuuucuuaa

SEQ ID NO: 4202298 - RNA, 85 nt, Human
uugaugcaaauuagauugguuuuauccuacccacacagcccuccaaaauuaggaagagggggauaagagaguauuuaugcauuaa

SEQ ID NO: 4202299 - RNA, 104 nt, Human
uugaugcacuacuauguuuuauuuuauucaacaaugaaagcuaaggaaucuguaugguuaaacuuucagcuuugguuguuaugaaacucuggauuugcuuucag

SEQ ID NO: 4202300 - RNA, 63 nt, Human
uugaugcuaaauucauuauugauuuaucauucuucauggauaccauaaugagauuggccucag

SEQ ID NO: 4202301 - RNA, 130 nt, Human
uugauggaauaugugcugagaaauguauagugaauuuuuccucugauaccugcuacaaagcauaagauccccugaaggacuuuauugcauuuuaucaccaaaaaagcacauuagcacucuaucccauuga

SEQ ID NO: 4202302 - RNA, 71 nt, Human
uugauggcacauuucaguaaguguuaauuuggauuucuuuagaauucacuuuauauggaaaaggucaucaa

SEQ ID NO: 4202303 - RNA, 57 nt, Human
uugauguagaaccaagaucuuuuauuugauuaaggaucuucuuggggucuacaucaa

SEQ ID NO: 4202304 - RNA, 88 nt, Human
uugaugugugacuucagaauagagacuacucagagauauguaaucuuauuagugucugucugaguuuuuucacugucauaacguacaa

SEQ ID NO: 4202305 - RNA, 70 nt, Human
uugauguugagugggaagggggacuuucuguuuggauccaaucccagaauacccaucccuucaacuccaa

SEQ ID NO: 4202306 - RNA, 76 nt, Human
uugauguuucagaggaggaaggcaguuaggggaauauuuuccucccuaacauuuuaucccugcugaaauaagucaa

SEQ ID NO: 4202307 - RNA, 56 nt, Human
uugauuacuuaaaccuucuguugagcuuuuagacagauggucuuuugaguaaugaa

SEQ ID NO: 4202308 - RNA, 74 nt, Human
uugauuauagaaucuuggcuuugaugggacaacuugggaagggguccaaggaagugaagguuacucuagauugg

SEQ ID NO: 4202309 - RNA, 57 nt, Human
uugauucauuuauugagugccuauuuuuucagaugcugggcauucaguagugaacaa

SEQ ID NO: 4202310 - RNA, 75 nt, Human
uugauugacuguagaggccuggauugaggaggccugugcuucugggccccuggcuaggcuuccacaguugcucaa

SEQ ID NO: 4202311 - RNA, 65 nt, Human
uugauuuauugcacuauugauuuucuagacuuaagcaagugauggagaaagugucaaugauucag

SEQ ID NO: 4202312 - RNA, 63 nt, Human
uugcaaaacagguagugggcuagaucuggcuugcaggccacaguuugccaacaccuacugcaa

SEQ ID NO: 4202313 - RNA, 81 nt, Human
uugcaaaggcuuccugggcccugcuuaagcaaugucugagauuucagaauguguugugggagccucagggaggcugggcaa

SEQ ID NO: 4202314 - RNA, 129 nt, Human
uugcaacaggauuagauagcaacaugucucuccauaaauguuuuguggguugaguuucuuuaaggagaacuuaggaaaauaaggcaugauggagagggugcaauugaugaggucugauacauaaagcaa

SEQ ID NO: 4202315 - RNA, 57 nt, Human
uugcaagaaugccuaaggaugccuauugguuguggggcaaaucacagguaauugcaa

SEQ ID NO: 4202316 - RNA, 74 nt, Human
uugcaauuacagaugaucucacagcagaaaauaacugcguaauuguuuucuguguagagaucacagaauuguag

SEQ ID NO: 4202317 - RNA, 66 nt, Human
uugcacaauguaggauauguacuugugugagauuucucuacauacuuuagcacugcauuguugcag

SEQ ID NO: 4202318 - RNA, 87 nt, Human
uugcacaauuccaggaggcagcauucgcauagacagccuaccugugaucagccugggaugugacuguugcccccaugaguuaugcaa

SEQ ID NO: 4202319 - RNA, 87 nt, Human
uuccacauuaguucauucagacuuucagauaaucaagaugguuuuuuuaacucaucuucagagaguuggaaagaauuaauaauagaa

SEQ ID NO: 4202320 - RNA, 60 nt, Human
uuccagagaggcucauguucccucggguacuggaacaaaaugaaagcuuuucaaguggaa

SEQ ID NO: 4202321 - RNA, 80 nt, Human
uuccagauggaaaagccuguggauaaaccaagaagcccccuuuaggacccuuuucaacuacagguuaauuuucaguggaa

SEQ ID NO: 4202322 - RNA, 63 nt, Human
uuccagauuugaaguaaguaaugaguauuugaagaaaaugcucauucauuuucagguagugaa

SEQ ID NO: 4202323 - RNA, 77 nt, Human
uuccagcaagugcccacugaggcccaguccugcaagcacguaccacgugagcagcucugugucucuggaaccuggaa

SEQ ID NO: 4202324 - RNA, 69 nt, Human
uuccagcagagggcccuggcugcggucuucccacugcuuugacaguacccaguuagagcccuuuaggaa

SEQ ID NO: 4202325 - RNA, 59 nt, Human
uuccagcaggguacuuguaauucccagcuucaugggagucaagaugcaucugugaggaa

SEQ ID NO: 4202326 - RNA, 87 nt, Human
uuccagccguggcagcuacagguggcaagacuguggggaaaugauuuuauuugucuugccauuuaguuucucaucugcaaaauggaa

SEQ ID NO: 4202327 - RNA, 86 nt, Human
uuccagcgaguucuaucaggaaaauuagccugacauuuagcagucuuuagcaagagucaaaauuuaccagaaugaaccguaaggag

SEQ ID NO: 4202328 - RNA, 57 nt, Human
uuccaggagacccagaauguugcuguggucuaccaggcagaguagggacuuguggaa

SEQ ID NO: 4202329 - RNA, 57 nt, Human
uuccaggcuucucuggggcgucaucugcacucgcgcugccucccuggagccugcgaa

SEQ ID NO: 4202330 - RNA, 71 nt, Human
uuccagguccuacuggcccauagugucaggacccuggcuguuugggcugugggcucucaugggaccuggag

SEQ ID NO: 4202331 - RNA, 124 nt, Human
uuccaguaugucacuaugguagaaaaagagauggguaaaauucuagcaucugaaaggaaauaaucuuugccaggcuugcaugaauuugauccuagcuuaucuuacauauuguacagacugugag

SEQ ID NO: 4202332 - RNA, 59 nt, Human
uuccaguccagggcuguuuccacgacgcacagucuguggucuuagcguuugguuuggaa

SEQ ID NO: 4202333 - RNA, 65 nt, Human
uuccagucuggcucagcacaaaggggcugaugaucacuucuggugucaaggccaggcaucuggaa

SEQ ID NO: 4202334 - RNA, 55 nt, Human
uuccagugaugggcaauuugguguuuuuuuaagaccauuuaucccauuaauggaa

SEQ ID NO: 4202335 - RNA, 58 nt, Human
uuccagugcuuuuuuaccuuccaacccugaacauguugagagaaagagaagccuggag

SEQ ID NO: 4202336 - RNA, 58 nt, Human
uuccagugggcugggaguaagggacagauuguggacccugacgaaaggcgugcuggag

SEQ ID NO: 4202337 - RNA, 75 nt, Human
uuccaguuuaagcaaguugacauagcauaauccaguacauaugacuaugcaaggguuuaguuguuuaacuuggga

SEQ ID NO: 4202338 - RNA, 94 nt, Human
uuccauaagagcuauuucauaacagcuuccuuuuacucccauaaagucacccagugacuaaagguuaguucuuagaagugcacuucacauggaa

SEQ ID NO: 4202339 - RNA, 57 nt, Human
uuccauauucccaauuuugccaccugaucacuuugagguaaaauguggagcuuggaa

SEQ ID NO: 4202340 - RNA, 71 nt, Human
uuccaucgugaaggucucaguccccuacagacuaauggugaguggauguaacaugggaccugcgaaaggaa

SEQ ID NO: 4202341 - RNA, 129 nt, Human
uuccaugaauuuccuuagcccuugauccuaaacuauugagaaagcuuacauauccaaaaugagucuaacuuuucuaagcaauggucuugggagauguacauauuucacuagggcuuccuggagcuggaa

SEQ ID NO: 4202342 - RNA, 71 nt, Human
uuccaugcagggacuagagaacaggaagagcaacaguaguccucuuguucuacccuauccacuacauggga

SEQ ID NO: 4202343 - RNA, 103 nt, Human
uuccaugcuucacuggcucaagaacaguuugccaaauugguggacuacuuugccaauccuugcuagcuuuuuuagagaucagaaaaugaaaacccugcuggaa

SEQ ID NO: 4202344 - RNA, 76 nt, Human
uuccaugucaucuucaguuuucagugagccaucauuccaaccugcuggcaaacacccaggaauggaggacauggag

SEQ ID NO: 4202345 - RNA, 55 nt, Human
uuccauguguacauauguguuuauauguuugcauguguguaugugcacaugcgaa

SEQ ID NO: 4202346 - RNA, 70 nt, Human
uugccucucaggaggugauucauauuucaauauauuccagcugaaaaaggaucagauuuugagcaggugg

SEQ ID NO: 4202347 - RNA, 56 nt, Human
uugccugaggcuuuguaauauccucacuguaguagaguuguugaaacuucagguaa

SEQ ID NO: 4202348 - RNA, 83 nt, Human
uugccuggcucucugagauauugagucuucaaccuuuagcugccugugagugacugcucaaaugucauggggagccucugcaa

SEQ ID NO: 4202349 - RNA, 101 nt, Human
uugccugugagcagagagguucugacuugugcauugcuguuagauauggagaggaacaagcacagccacugagugagaaccccacaaaugcugauagacaa

SEQ ID NO: 4202350 - RNA, 80 nt, Human
uugccuucagggagcuugugugcaggugcacgguuugauuccuaaucauaaauaguugugccugaaugcagugaaggcag

SEQ ID NO: 4202351 - RNA, 92 nt, Human
uugccuucauuauuccuggggaugaaauagaauuaauuuaggccauggaaucuucgacugccuguucuuucacccaggaguuguggggggag

SEQ ID NO: 4202352 - RNA, 69 nt, Human
uugccuuguggccuucuguuccugagccucuucugugugugcagggaggcagcagguuguccaggguga

SEQ ID NO: 4202353 - RNA, 59 nt, Human
uugcgcauguacccauacaucugcaacauaccccagcacauauaugugcacaugugcag

SEQ ID NO: 4202354 - RNA, 86 nt, Human
uugcgguccaugggagugacugguuguauauggaauguuccugcaaguaugggacaagcaguaaaggccacagucucaggauccaa

SEQ ID NO: 4202355 - RNA, 55 nt, Human
uugcuaaaaauggaauuauaggugucuuuagggauaaauauauaauuuuuggcag

SEQ ID NO: 4202356 - RNA, 66 nt, Human
uugcuaagagcuucaugccaggagguuuaagaccuaugucuuaugacucagcgugagcaagagcag

SEQ ID NO: 4202357 - RNA, 76 nt, Human
uugcuaauuagaggggucuuguggccuagaacagcuucuuagucuuggcuuuaggccaaagccuaacuagauguaa

SEQ ID NO: 4202358 - RNA, 74 nt, Human
uugcuacagaaaccugauguauagauucuagaugugcaaacauaaagaauguauaucaagggagaaugugacaa

SEQ ID NO: 4202359 - RNA, 68 nt, Human
uugcuaguaguguguaggagaaccaguggugcacaccuucugggcaguuuuacaucauugcauaguag

SEQ ID NO: 4202360 - RNA, 57 nt, Human
uugcuagucucuguuucaggauaggguauuaacuaucugggcagcagcagcuaguag

SEQ ID NO: 4202361 - RNA, 57 nt, Human
uugcuagugggaacugaguauugcuugguagauaaguaaucucaguauccuaugcaa

SEQ ID NO: 4202362 - RNA, 111 nt, Human
uugcuauuuaauuuagacauucugucuguggagcuucugauguguauuccuuaucuaacauauacauuacuugauaagacaggcucuaugauuaucuaaauugaaaagcaa

SEQ ID NO: 4202363 - RNA, 114 nt, Human
uugcuauuugcauagucauuucauuggauaguuuaugaaaaauggaagggaaaguauuuucuuacagugccauuuuucacaagacucacuuccugaugagaacaugagaagcag

SEQ ID NO: 4202364 - RNA, 76 nt, Human
uugcucacacacucuuccuggcaccuagcacaauucuuggcacagaguaggugcucgggaaguguuuguugaguga

SEQ ID NO: 4202365 - RNA, 61 nt, Human
uugcucaccaacucugaaaauccagauauagcaguagaugcuaggaaggaguuaggagcaa

SEQ ID NO: 4202366 - RNA, 129 nt, Human
uugcucaccuuucaugaagggcugauagucaaacuuggguauggcugugccaguuguuuauggccaguggucuccugguuagucaguaccugagugugaucaguuguuacauguuuuguauaugagugg

SEQ ID NO: 4202367 - RNA, 60 nt, Human
uugcucaugugugauuacaguuuuugguguucacagaggaugaaagucauuuaugggcag

SEQ ID NO: 4202368 - RNA, 129 nt, Human
uugcuccauggccccccucgcccccacccacccccaaucccagcccagaacgguggcagucauucugcccagcaguggggcgcugggaguugguggcuggguggggcgacgagguggcgucugcugcag

SEQ ID NO: 4202369 - RNA, 57 nt, Human
uugcucccagcugcccugcaugguuuaauagacaacuauguaaaagacagggaguag

SEQ ID NO: 4202370 - RNA, 65 nt, Human
uugcucuagggcucagcucuagcuccugaugaaaaccagaucugggagcuuggagccuuugguga

SEQ ID NO: 4202371 - RNA, 68 nt, Human
uugcucugacuggagugcagugguguggucauagcuuacugcaaccuuuaacuccuaggcucaagcaa

SEQ ID NO: 4202372 - RNA, 76 nt, Human
uugcucuguugccuaggcuggaguguaguggugugaucucggcucacugcaaccucugccucccggguucaagcga

SEQ ID NO: 4202373 - RNA, 73 nt, Human
uugcucuuacucaaauagcugccccuaguggacugaagaguuauuacuggagugaguuuggaucaaagagcaa

SEQ ID NO: 4202374 - RNA, 79 nt, Human
uugcugaacagugguucaugucacggauuucuucugcugauaauuauuuaguaccgucgauaggacauaguggaaguaa

SEQ ID NO: 4202375 - RNA, 69 nt, Human
uugcugaggcugggcuugccuucuugguuacgaggccaugacgggcagucgcucagcccuccuuaggaa

SEQ ID NO: 4202376 - RNA, 62 nt, Human
uugcugagucucuagguaugaugagcacaguaauuugaaacuguaaccugagauuaaggcaa

SEQ ID NO: 4202377 - RNA, 79 nt, Human
uugcugauuuuauauggcauacuguggaauugggacuuuauccuaagaacuauggggagccauuuaaaggauuaagcaa

SEQ ID NO: 4202378 - RNA, 101 nt, Human
uugaggcaggagaaucgcuugaacacgggaggcggagguugcagugaguccagauggcaccacuacacuccagccuggcgauaagugagacucugucucaa

SEQ ID NO: 4202379 - RNA, 93 nt, Human
uugaggcauaauugauauagaaaaauugcacguguuuaugcuuuuugaugagcuugaacauaugcauguuuguuuuguuuuauuuuguuuuaa

SEQ ID NO: 4202380 - RNA, 78 nt, Human
uugaggcccacaguggauugggugaugcccacccccauuggggagggcaaauccacuuuacucaguuuacugauucaa

SEQ ID NO: 4202381 - RNA, 59 nt, Human
uugaggcucugugaugugccaggcacuguucuaagugcuggagacauagcaggcagcaa

SEQ ID NO: 4202382 - RNA, 103 nt, Human
uugagggggagucucgcucuguugcccaggcuggagugcaguggcaggaucucgguucacugcaagcuccaccucccggguucacgccauucuccugccucag

SEQ ID NO: 4202383 - RNA, 67 nt, Human
uugaggguuacuccugacuguguuaacuagaaucucuaguuugucacaugcaggcaguggccuucaa

SEQ ID NO: 4202384 - RNA, 56 nt, Human
uugagguaaagcuacuaguuaguuuugaagguaauggagcuaggcaagugccucag

SEQ ID NO: 4202385 - RNA, 76 nt, Human
uugagguaauaaacagccauuccuguuggauaaccccagagagugagacuuggcugcauaucccuaccugccucaa

SEQ ID NO: 4202386 - RNA, 130 nt, Human
uugagguagagucuugcucuugucgcucaggcaggagugcaguggcgcaaucucagcucaccacaaccucugccuccuggguucaagccacugcacuccagccuggcgacagagcaagacucccucucaa

SEQ ID NO: 4202387 - RNA, 103 nt, Human
uugagguaggguuuugcucuguugcccaggcuggaguacaguggugugaucacaacucacugcggccucaaccucccaggcucaagcgauccucccaccucag

SEQ ID NO: 4202388 - RNA, 77 nt, Human
uugaggucagcaaagaguguuaaaaaucccaugauaugaaauuuucauuuaaugcacggauguagccucugacccag

SEQ ID NO: 4202389 - RNA, 56 nt, Human
uugaggucucuacagaagagugauagauaucuauucucuguugaaugagauaucaa

SEQ ID NO: 4202390 - RNA, 57 nt, Human
uugaggucuugaguacuggggaacauucauauagaggugagcaguuuuaaggcccaa

SEQ ID NO: 4202391 - RNA, 103 nt, Human
uugagguggagucucgcucuguugcccaggcuggagugcaguggugcaaucucggcucacugcaaugucuaccuccuggguucaagcgauucuccugucucag

SEQ ID NO: 4202392 - RNA, 87 nt, Human
uugagguuuauaaagacaggucuacuggcaagcaguggauaguuuguucauguagcuuuguggaccugaguacacuuguaucuucaa

SEQ ID NO: 4202393 - RNA, 68 nt, Human
uugaguaaagggccagauaguaaacacuuuagguguugaaggauauguggucuuuccuaacugcucag

SEQ ID NO: 4202394 - RNA, 83 nt, Human
uugaguagcuuggucuguagaugagucuuaagaauuugauuccauaugugaauucugaaauuucuguagaucuuguuacuugg

SEQ ID NO: 4202395 - RNA, 109 nt, Human
uugagucagggagccuggaccugugacuuggugaggccccagggauuaggccaaccacaggucugggguaccuggcccuggggcugcugccuagucauuucugacucaa

SEQ ID NO: 4202396 - RNA, 73 nt, Human
uugagucaguuuucuccagggggcuaaauuacuuuuuggaaguaaacucagagcaauggaagaauugauuuaa

SEQ ID NO: 4202397 - RNA, 55 nt, Human
uugagugacugagagcagugcuuuucaaacgguaauguucaaacagaucacuuag

SEQ ID NO: 4202398 - RNA, 58 nt, Human
uugagugacuucaaaauucaguuagacaaaacagacagcugaguucugugguucucaa

SEQ ID NO: 4202399 - RNA, 99 nt, Human
uugagugucuacugugccaguuagugugauggagguacgaugguaagcaugcagaaucauuccucgcccucacagugcacuaaucaagugaucauuuaa

SEQ ID NO: 4202400 - RNA, 63 nt, Human
uugagugugguaugcucugaggcugaaucacauaggaugcagcuuucacaggauuacacuuaa

SEQ ID NO: 4202401 - RNA, 65 nt, Human
uugaguucuggugguuuggagaucuuuguuccccagaacaaaggaaugcuuucaccaggacacaa

SEQ ID NO: 4202402 - RNA, 71 nt, Human
uugaguugacaucuugguugcaauuaguuacaaaagugguuccaauauuauuucaacaggugucaacuugg

SEQ ID NO: 4202403 - RNA, 67 nt, Human
uugaguugcaugcuagaauucccauuuugggcauuggcucagacuggggagagucaugccagcacaa

SEQ ID NO: 4202404 - RNA, 60 nt, Human
uugaguugggugucuaucaccuacaaacuaaaugucagugcacagucaagcccagcuuag

SEQ ID NO: 4202405 - RNA, 85 nt, Human
uugaguuucuaauuaauuucuggagggagaaagaguagaacaaaguauucccuugacuucuucuagaaauaagcaagagaaccaa

SEQ ID NO: 4202406 - RNA, 56 nt, Human
uugauaaacuuguggaguuuuggucuccuaguaggcacucuauaaauguuuguuga

SEQ ID NO: 4202407 - RNA, 124 nt, Human
uugauauauacugauccauuuuuuuaggggcuaugcagauucaaaugaaaugcaacacaaugaaaauauguaguucauugucaaugaaugcaugguauuugcauguggguuuguauauuguuaa

SEQ ID NO: 4202408 - RNA, 81 nt, Human
uugauauucaugagcaucucuauagugacugugccuggcagguauagcaugugugguggugaaauggggcugacaugucaa

SEQ ID NO: 4202409 - RNA, 83 nt, Human
uugaucaggcuucauuguggcaucaggacccuugagaaucuauuuuucuuugcucaaauucuaugcucaauggagccuuuuaa

SEQ ID NO: 4202410 - RNA, 82 nt, Human
uugaugaaacaugggcaguuugggaaaauggucugaaccuccaaguaucaguguuccuugagacugccaauugauacauuaa

SEQ ID NO: 4202411 - RNA, 56 nt, Human
uugaugaggcaugggaucaaaaugauauuagucauuugauugagugccuuaugcag

SEQ ID NO: 4202412 - RNA, 79 nt, Human
uugaugauauucagacugcuuagcucccaguaguccucagaaguuaccuuggaggccaagcaguuuagggaaugaucag

SEQ ID NO: 4202413 - RNA, 60 nt, Human
uugaugcugacugaccaaaaggauagauucugcuggcuauuuacugucucucagcuucaa

SEQ ID NO: 4202414 - RNA, 121 nt, Human
uugaugcuguauuuuuccauauaaauuguuaaauuggcuuugugguuucugcaucaaucuauuguugcacugaucagggagccuaauuuacucuggauacacugacaaaaacaaauuucaa

SEQ ID NO: 4202415 - RNA, 61 nt, Human
uugauggcaaggguuuacauucggauaaaaccauuucacccaugcaagcccucuccauuaa

SEQ ID NO: 4202416 - RNA, 79 nt, Human
uugauggcaauauuguauaauagugggcuacugagcaacuauuuccagcuucguggucagugguacaguuugaaaucaa

SEQ ID NO: 4202417 - RNA, 73 nt, Human
uugaugggaaguucugaccauauggccaagguaaaggaauccuaggaguuugaagucagacuucauuaaucaa

SEQ ID NO: 4202418 - RNA, 81 nt, Human
uguguuucuugcacuccccggacuguggcgaaauggcgugcuuugugugucugugguuggggggaagugggggaaaugaca

SEQ ID NO: 4202419 - RNA, 76 nt, Human
uguguuuguccugaugugaacauuuuuggucauuauuuaccauaaugauuacugaucgcauaggaaggaagacaca

SEQ ID NO: 4202420 - RNA, 60 nt, Human
uguguuuguguuucagacgaaucaaaguaaaaaugcuuuaagugaugaaaugcagauaca

SEQ ID NO: 4202421 - RNA, 62 nt, Human
uguguuuugugucacauuacacugauuguggaucaguuaguguccuuaugucacaagcaaca

SEQ ID NO: 4202422 - RNA, 68 nt, Human
uguguuuuuaguuuaaguuuuugcagugccuuaguugcauaagugcaagagcccaaacuauauacaca

SEQ ID NO: 4202423 - RNA, 63 nt, Human
uguguuuuucauuuguuucaguugcauaaguagguguccuauuuugcaauaaaugaaagacca

SEQ ID NO: 4202424 - RNA, 85 nt, Human
uguuaaacaugcagacuccugggucccaucccagagugacugagucagaauccagcguggggcccagaaaaguaacaguuuaaca

SEQ ID NO: 4202425 - RNA, 73 nt, Human
uguuaaaguuuggcagacaauaacacaaaaaaagcaauuuuaccugcuacagugucugucugcuuacuugaua

SEQ ID NO: 4202426 - RNA, 68 nt, Human
uguuaacauauggagaugauaccacauuugccuguuuggguacuagugucauuccuucaauguagaua

SEQ ID NO: 4202427 - RNA, 81 nt, Human
uguuaacaucccagguuuuguguagaauagcuuaucugguucaucaggugagugugacugcaagagaugggacaaaugaca

SEQ ID NO: 4202428 - RNA, 70 nt, Human
uguuaagacuguacauuuuccagucuuuggaaacagccuuauuuugaaaacugggcauguacacuucuca

SEQ ID NO: 4202429 - RNA, 73 nt, Human
uguuaagagucuuauaguguaauuaaggggccccucaguauuucuugaaguauauuuuauagggcucugaaua

SEQ ID NO: 4202430 - RNA, 75 nt, Human
uguuaagguguaaguauaaaaugcuaagcuuuuaucccuagaaauucagcaaaaagauacaggacaccuuuggca

SEQ ID NO: 4202431 - RNA, 68 nt, Human
uguuaaguaauggccaagcuuacucuguuguguauuaaggacaagauagauuauuuuggcacuuguca

SEQ ID NO: 4202432 - RNA, 74 nt, Human
uguuaauaggaaucagaauuaggauuugaagccaggaccgccugauuuuuuucaaaauucuguuuccuacaaca

SEQ ID NO: 4202433 - RNA, 72 nt, Human
uguuaauuaacaaauauuucccaugcccagcacguuuggauguuuggagggcuggauguuugaugacgaaua

SEQ ID NO: 4202434 - RNA, 69 nt, Human
uguuacccagucuggagugcagugacaccaucucggcucacuguaaccuccgccuuauggguucaaaca

SEQ ID NO: 4202435 - RNA, 74 nt, Human
uguuacgguaacuucucugcuaucauaggauaagugaggcauaugaucuuuugaaaagcagauguuaaguggca

SEQ ID NO: 4202436 - RNA, 65 nt, Human
uguuacugcaaaaaguuugcaauggccagcucgugaguuccauuuggcaaacauuuuacagagca

SEQ ID NO: 4202437 - RNA, 129 nt, Human
uguuacugcuuccuguucugagacuccccuucuggcaaccuuuuccucucacuccucacuguuucuucgggguagaaaauuaggaugaggcuuguuaacaugggugguucaagucugggaagcuuaaug

SEQ ID NO: 4202438 - RNA, 58 nt, Human
uguuagaagacucuuuuaccuauaauuuuguguucagugauguugggggucuucugca

SEQ ID NO: 4202439 - RNA, 85 nt, Human
uguuagaaugcauguugcuuggcccacuccagagaauccgauucaguaggucuggggugggccccagguaucuguauuuuuaaca

SEQ ID NO: 4202440 - RNA, 88 nt, Human
uguuagauucaaauguauggcaguuucacucugggauuccaccaaaaggaaucuguagggaacaacuguacagaacacagaacugaca

SEQ ID NO: 4202441 - RNA, 64 nt, Human
uguuaggaaggaagcucgauauuuccuuuuaagaaaggaaguuauaaacuuuuccucccagaca

SEQ ID NO: 4202442 - RNA, 83 nt, Human
uguuaggcugaaacauaugaagaugucuuuuuguaggucaaaaucugucaaauauugacagcuuuauuacauucaaucugaua

SEQ ID NO: 4202443 - RNA, 96 nt, Human
uguuagguagaauucagaauauuuguuuuacauggcaacaauuaaacuauauauugcuaucuauuuaaaaucguguucugcccauucucucuaaca

SEQ ID NO: 4202444 - RNA, 84 nt, Human
uguuagguuggugcaaaaguaauggcgguuuuuaccauucaaaguaauggcaaaaaacgccauuacuuuuguaccaaacuaaua

SEQ ID NO: 4202445 - RNA, 83 nt, Human
uguuagguugugcaaaagugauugcugguuuugccauuaauuuuaauggcaaaaacugcaguuaccuuuguacaaaccuaaua

SEQ ID NO: 4202446 - RNA, 69 nt, Human
uguuauagauaaaaaggcugagucaccagcagcagcagagacuuagcagguacuuucauauuuuuaaca

SEQ ID NO: 4202447 - RNA, 80 nt, Human
uguuauagcagcacaaaguggaccaagugccuuuucauguacuauguccuuaaccacuuguguuuauuccugcuguagca

SEQ ID NO: 4202448 - RNA, 76 nt, Human
uguuauaguggcguuguccaaacuugaguggagcaauugacaguuccacaucuagguuugucaacaacaaauaaca

SEQ ID NO: 4202449 - RNA, 78 nt, Human
uguuaucccaguugcucagucaguuuuugugagagauucagggaucuuaauaaaacugugcugcuacugcuacuaaca

SEQ ID NO: 4202450 - RNA, 82 nt, Human
uguuauguacagguuagcaaaaauaucucauauuacuguguaguuacuuaaaaauuuuugcuuuagggcuguguacauaaua

SEQ ID NO: 4202451 - RNA, 130 nt, Human
uguuauguguauuuacuacaauuuuuuaaaaaucguauauguaguuuaacagguguggucaauaucaaaacuuagguauuuaaucuuguuaaauuauauaagcagaaaaugcuggaaaaaguaccuguca

SEQ ID NO: 4202452 - RNA, 59 nt, Human
uguuauugagguuacuuauaaggugugauagaaacaccaaggaagaacacucaauagca

SEQ ID NO: 4202453 - RNA, 64 nt, Human
uguuauugggcuuuaauuccagagaggaaaccaaugccccucuauucugagaagcccaauaaua

SEQ ID NO: 4202454 - RNA, 130 nt, Human
uguuauuguucuauuuauuuuuucuguguuuaccucaaguuggcaugaacaaauuaguaaaauagcuugcaaauuugugcaucuguuaauuaugucuaaggcccaguacuagaauauaugaauuuaaaca

SEQ ID NO: 4202455 - RNA, 117 nt, Human
uguuauuuaaaccuauuuuauuaucucaugcugacuuuuaccuguagcuuguagguaagcaauuuagaaucugacagucacaguggaggauuaauaugggaaugauagguuauaaca

SEQ ID NO: 4202456 - RNA, 82 nt, Human
uguuauuuucauaaaaagcaaggggcuuagacagugacuaucauaacugaauggaaucaucccugcuuuaagaaagguaaca

SEQ ID NO: 4202457 - RNA, 67 nt, Human
uguucagauuucaugaguaauugccauguaaaagguaacuuggcggugggcucagugaagcugaaca

SEQ ID NO: 4202458 - RNA, 79 nt, Human
uguucagcaucuggugagggccuaguuucugguucuuaguggcaccuucuggcuauauccucacaagauggaaugagca

SEQ ID NO: 4202459 - RNA, 62 nt, Human
uguucaguugaccguggcucugggguauugguuggaaccagaggagcuguguuagcuggucg

SEQ ID NO: 4202460 - RNA, 72 nt, Human
uguucauguuucauuuguuacuauaauuauauaauuuaauucaguguuaagugaaaugaugaaaugugaaua

SEQ ID NO: 4202461 - RNA, 63 nt, Human
uguucauuaguggaaguaaguugugggcuaaggccugcacuaaugcugcacugaugcugagca

SEQ ID NO: 4202462 - RNA, 58 nt, Human
uguuccagugcagagggcucuuuaugaaacaugcuacaguguccuuuuacugugaaua

SEQ ID NO: 4202463 - RNA, 73 nt, Human
uguucccaaucgaugugacaguauguuucaaugaacagaucagauugaauucauuucucauugagugagaaua

SEQ ID NO: 4202464 - RNA, 61 nt, Human
uguuccccucaaauauuuguuggagauuauucugcuagggaagaacgagggaauuagaaca

SEQ ID NO: 4202465 - RNA, 82 nt, Human
uguuccuccaggagguagugcuuaauuucccccaccuuaaguguggauugaacugagugacuuccuucuaaagaagagaaua

SEQ ID NO: 4202466 - RNA, 80 nt, Human
uugguuagguaguggaaccuucuaaaugacgcacuaugugauuccugugucauauagaauguucuaugauucuuagccag

SEQ ID NO: 4202467 - RNA, 75 nt, Human
uugguuagguuagaccuauuuucucagaauauaccgcucuguaggauucugaguuagagucagccagaagaccaa

SEQ ID NO: 4202468 - RNA, 70 nt, Human
uugguucaguuuacauuaaaaucugugcuuauaaguaaaacacagcagauuuauugcaggcugaugcugg

SEQ ID NO: 4202469 - RNA, 103 nt, Human
uugguuguugauugaaagacauaaaauggaauucuguugcuguaagaaacacauggcauuucaguguuauucuaauuuuaugaguuucuauuauacauacuaa

SEQ ID NO: 4202470 - RNA, 77 nt, Human
uugguuuggagaagcuguagguggacucauuagacauggaacauuuuaugugagugcuuaaggauuucucuagcuga

SEQ ID NO: 4202471 - RNA, 93 nt, Human
uuguaaaaaucuuuguauaaaagguuuauuguagguguaaauuuuaugcauuagauugcacuuuauagaaacuuuugaaaaauauuuuggcaa

SEQ ID NO: 4202472 - RNA, 89 nt, Human
uuguaaaaugacaggguaggauuauggugaugucuuaggggcugucuuccagcucuaucauucugugauucuaaaucccuuuauaacaa

SEQ ID NO: 4202473 - RNA, 58 nt, Human
uuguaaacuucuuuugguuuuauggccauagugcgcuuuagacauaaagaguuugcaa

SEQ ID NO: 4202474 - RNA, 61 nt, Human
uuguaacuuugcauacuccuguucccccauccccagugagucugugcugaagaaguuacaa

SEQ ID NO: 4202475 - RNA, 69 nt, Human
uuguaagcccugcagucucugccacagcuauucaacucggcuauuguggugagaaaguaguguggacaa

SEQ ID NO: 4202476 - RNA, 77 nt, Human
uuguaaggguuacaagaaaacaucucuuccuagaucaagaucaacccuagugagaaguguauuacuuggucuuacaa

SEQ ID NO: 4202477 - RNA, 58 nt, Human
uuguaauugucauagcuuagguuuuauacauauuguguuguaagcaaugacauugcaa

SEQ ID NO: 4202478 - RNA, 130 nt, Human
uuguacaauuugcauuuauaaaaccgugauuauaacuugguaugcuaugagauacagagauuuauuguuuuaauaagauuucagguaagaaaacuaagaacuauaaauugguaauaauguagaaaagcaa

SEQ ID NO: 4202479 - RNA, 82 nt, Human
uuguacagcuagaagcagcuugguuuuaggcauggaaugaaccucucugcucaugcuuaugaagcuguuacuuggucaacaa

SEQ ID NO: 4202480 - RNA, 70 nt, Human
uuguacugcccuccuccugagcccauguuagacaggucuuauagucaaggcaggguaggaggguggacag

SEQ ID NO: 4202481 - RNA, 82 nt, Human
uuguacuuccgugccugaagaaaacuugcagcacugguauacugccuguaugucgggguuucuucuggcaggaaggauacag

SEQ ID NO: 4202482 - RNA, 76 nt, Human
uuguacuugucauggcuguuuagcuucucugcuucacuagaauauacagggagaaacagcuuaggaugugauacaa

SEQ ID NO: 4202483 - RNA, 85 nt, Human
uuguagaagggauuugagauuuuugccuauuuuacgugcucaaaggugggaaauauucuaaaagucuugugaauuuuguuuacag

SEQ ID NO: 4202484 - RNA, 130 nt, Human
uuguagcaaguguugaucucugugguguaaauauucccaucauguguaauuucaagcuacaaugcaaaguugggaagagauuuccacaucauuagauaguauucccaucauauagaugauauagaugcaa

SEQ ID NO: 4202485 - RNA, 70 nt, Human
uuguagcagaugggagauggagcugccuagauggggugauuucagggauagcgcacucauaucugcucaa

SEQ ID NO: 4202486 - RNA, 80 nt, Human
uuguaggaugcaagucgggaggaaaggcucuaaagagaagcaaacuucucuguggccuccuuccacuuacagcucuggga

SEQ ID NO: 4202487 - RNA, 68 nt, Human
uuguaggccacagagaggagauuucgaucuucauuggagagagguucauucagcucugucaccugcaa

SEQ ID NO: 4202488 - RNA, 70 nt, Human
uuguagggaaugauacauaaaccaucauuuuguguaauucucacaauggcuuuauguaucaucuccacag

SEQ ID NO: 4202489 - RNA, 60 nt, Human
uuguauagacuagcuuucacgauguuagggaauuauuauugugugauaauggucuugcag

SEQ ID NO: 4202490 - RNA, 58 nt, Human
uuguauauaaagcccccacuguuugucaagaaagugauguuagggguauuauuuauaa

SEQ ID NO: 4202491 - RNA, 68 nt, Human
uuguauauugcaaucccuagugaccuugcaggaccacuagagcaaagucauggggaugcaggucauaa

SEQ ID NO: 4202492 - RNA, 90 nt, Human
uuguaucauguuugcuauuguucuaguggcugaagcaaaccacauagucaaaccuagaaggagagcaacaauccaagggcauggcuacag

SEQ ID NO: 4202493 - RNA, 84 nt, Human
uuguaugacagauaagaggcauuuggcugucauuuguaguuuuugauuacuaguaaggucaaaaugcuuuuguauguuaaauag

SEQ ID NO: 4202494 - RNA, 65 nt, Human
uuguaugagcuccaggaacucaagccucaauuucuguaucugugcauuuguucccagcucugcaa

SEQ ID NO: 4202495 - RNA, 57 nt, Human
uuguaugcuguaggcaugcauuuuuuuaaguaaaugaguaagccccauagcaagcaa

SEQ ID NO: 4202496 - RNA, 84 nt, Human
uuguauuccugcuuuaccaaacucuuggauucauguaucuuuuguuccacucauucauccugacuaugggaaguaggaagccaa

SEQ ID NO: 4202497 - RNA, 110 nt, Human
uuguauucguagagucaguccuggaauugaggagaccagcguguccuuugaacgugcuagaaaauaugacugugcuccuuaaaggauaaaauacgacucugcgccuccaa

SEQ ID NO: 4202498 - RNA, 56 nt, Human
uuguauuucuuccggucucauuugugaugagagucauaagauuuugagaaauacaa

SEQ ID NO: 4202499 - RNA, 126 nt, Human
uuguauuuuaauuccuuggccuuacucuuucaggaaaguugagcagguaaaagaauucauuuauacaguuaaauaagaacuccauuuacucgugcucuccucggcugauuuuaaaggcagauauaa

SEQ ID NO: 4202500 - RNA, 67 nt, Human
uugucaaccauccaacagauauuuauggagugcauacuaagugcagggcacuguuggguguugagga

SEQ ID NO: 4202501 - RNA, 59 nt, Human
uugucacacccuuuuuuauaccuguggcuauauacuaaauguaaucugggugugugcaa

SEQ ID NO: 4202502 - RNA, 55 nt, Human
uugucacauguaguucauucucaguggugaauuuaggauaaacuaugugugacaa

SEQ ID NO: 4202503 - RNA, 64 nt, Human
uugucaccaugcaaaaugugaaaacuguaauuaacauaaagcauuucacaaaaguaugugacaa

SEQ ID NO: 4202504 - RNA, 58 nt, Human
uugucagggguacuacaugcgaugaggagaagccuagcacgcugugugcaccugauaa

SEQ ID NO: 4202505 - RNA, 101 nt, Human
uugucaucuucuugcaguaauaauucuaugcuaguggaaagcuucuagaaauccaaacagcaguagucaauguauagaggaguuguguaagaggcauucaa

SEQ ID NO: 4202506 - RNA, 61 nt, Human
uugucauuuguaguuaaaaaugucucccucagauagggagucagccaaauuaaaauggcaa

SEQ ID NO: 4202507 - RNA, 76 nt, Human
uugucauuuuagucuauacugucuuguaacagauuguuucacuaucucaaacuacaguauggcugucuuguggcag

SEQ ID NO: 4202508 - RNA, 55 nt, Human
uuguccaagggugcacaacuaguaagugguggugcuggaauuuguacccuggcag

SEQ ID NO: 4202509 - RNA, 85 nt, Human
uuguccaccaagugauuuguggagaugaggacugguaguaacuuagcaaugacuucagaauccagaaucagaauuggagugauag

SEQ ID NO: 4202510 - RNA, 97 nt, Human
uuguccacucucucuuccaacuuucuccuccggcuugcuguggcucaccgccccuucgaaguuaggcuggggguaggaauugaggagugggugccga

SEQ ID NO: 4202511 - RNA, 73 nt, Human
uuguccagcagguguuugccaacuugaagagcuaccuacuaucacagaccuauaaaaguacgccuguggacag

SEQ ID NO: 4202512 - RNA, 60 nt, Human
uuguccaggcucagcacuugcuacuggcuucccagagcagaguggcuguagcuugcucaa

SEQ ID NO: 4202513 - RNA, 66 nt, Human
uuguccauacaguggcacacaucuuuguuuuauacucacugggaugauuugccauuauauugucaa

SEQ ID NO: 4202514 - RNA, 63 nt, Human
uuguccuaauuuauggccuggaucccuacacuuucucuggaccagaggucauccugaggacaa

SEQ ID NO: 4202515 - RNA, 72 nt, Human
uuguccuccaguugcgaacuuggucccgucagggugaauaucaacugaaaaaaucggcuugccuggaaacaa

SEQ ID NO: 4202516 - RNA, 58 nt, Human
uuguccuggcccaaaugucaacauuuuguuaacauugauaguuugaugguuaggagag

SEQ ID NO: 4202517 - RNA, 57 nt, Human
uuguccuuaccucaaucuggaaugggagauucccaucugucagaucaggaaggauaa

SEQ ID NO: 4202518 - RNA, 66 nt, Human
uugucgacacugcauggaugauggcuguagucacugcuuccuuuuacugugcagugauuuggacag

SEQ ID NO: 4202519 - RNA, 72 nt, Human
uugucguucugggaacagccuggcugugucgcuauuucaaacaaagacauuucauguuuuccagagcagcag

SEQ ID NO: 4202520 - RNA, 71 nt, Human
uugucucugagcaugccauauugcuuuuguuacaacucaucaaaaugucccuucuuuggugcucagaguaa

SEQ ID NO: 4202521 - RNA, 76 nt, Human
uugucucuguuauuuccagggucagguuccuucaucuucaauuacuuagucuuaccgugauauauaacagagucaa

SEQ ID NO: 4202522 - RNA, 88 nt, Human
uugucugucuauauuugaaagagcugauacaugaaguuaugcaaacuucauucauaugcuuuguuagaguuauagaaaaaaaagauaa

SEQ ID NO: 4202523 - RNA, 64 nt, Human
uugucugucugucuuuuucuuuccuuucuccugggucaggcaggaaguuaaggcagacagacag

SEQ ID NO: 4202524 - RNA, 99 nt, Human
uugucuucugcugcccacaaaucuaaccucccuaauuaggaaccguauuauuuauguauguauccugaggaugguugaagugcauggcaggcaguacaa

SEQ ID NO: 4202525 - RNA, 61 nt, Human
uugucuuucaaagcuguaguagauuuucccccucauagaauccaucagcuuuugaagagga

SEQ ID NO: 4202526 - RNA, 69 nt, Human
uugucuuuuauuuucuaugaagugcaauuaacugucagauacauuuguugccauucauggagaaggcag

SEQ ID NO: 4202527 - RNA, 87 nt, Human
uugugaaaucaucauuccuuguaaaaaucuuaugaauggcaaggaauuccuuacccuucaucagauuuugggguuuugguuacaugg

SEQ ID NO: 4202528 - RNA, 84 nt, Human
uugugaauaucaaaugaguguacgugaaaguagauauauaaguuauuauguucaauguuuauauuucuucguucauucucacag

SEQ ID NO: 4202529 - RNA, 110 nt, Human
uugugacauagguacagauauuaaugcuggacucucagcuuugaugugaggaucaaacaugagcauuaagccuggcucagaggacauagcaaaugugaguuccugcacaa

SEQ ID NO: 4202530 - RNA, 91 nt, Human
uugugacccagggugagcugguuagagggaggcuggaggugaguuucgcaaccugcagccuuggcaaccagggacuguacucagggaacaa

SEQ ID NO: 4202531 - RNA, 109 nt, Human
uugugacucuguugguuuuccagcaaguaauuugcccugacuuaauguuugguguuucugcuucaggaguaaagaagacuugaccuggcagauuaauauuugaucacaa

SEQ ID NO: 4202532 - RNA, 109 nt, Human
uugugagaauucaguugaauuggauaacuuauguaaaguacaagccucauuacaaacaaacuguaaaagguuguucuuucguuguccccuuucucuaguuucuucacaa

SEQ ID NO: 4202533 - RNA, 60 nt, Human
uugugagcaugugcagccucugcccgcgccugccugccugcccgccugcccagcucacag

SEQ ID NO: 4202534 - RNA, 87 nt, Human
uucugugcccucuuuguucaggcugcuggcuucugggaggacagacuucaaaaaggccugguggccugcagaggccgagcacaagga

SEQ ID NO: 4202535 - RNA, 87 nt, Human
uucugugggcacagccaaaggcacacauaccuuucugcaauuguaagcaagacugggaguaugccucugacuccugagcccacagaa

SEQ ID NO: 4202536 - RNA, 95 nt, Human
uucuguguugccagccuggcuuucagacugugcucuggugaugucguuucgcuggagagggcagagaucugagugggcagagugggcagauggga

SEQ ID NO: 4202537 - RNA, 65 nt, Human
uucuguguugcuuuaucauuaaaugauggucaaugccgaccaucugcuugaaugagcaacaggaa

SEQ ID NO: 4202538 - RNA, 71 nt, Human
uucuguguuucuguaaguggcaaauaauggcaggaccucugcacauuuagcagacuguauagaaauuagaa

SEQ ID NO: 4202539 - RNA, 70 nt, Human
uucuguuagaagguaugauaggaaggaaacaacagguguagauccuuauaucuauaguuuugcagcagga

SEQ ID NO: 4202540 - RNA, 68 nt, Human
uucuguucaccucuauuuuguuugugccauggcaauuucuucaaggaagacuagaccagugaauagga

SEQ ID NO: 4202541 - RNA, 60 nt, Human
uucuguuuuauagagauuuggcauauuugauauauguucuuuggaauuuaugaaauagaa

SEQ ID NO: 4202542 - RNA, 107 nt, Human
uucuuaaccccaggugaccacuaaucuguucuccauuuuuaugauuucaucauuucaagaauguuguagaaauggagaacagauuaaugguugccaggggauaagga

SEQ ID NO: 4202543 - RNA, 86 nt, Human
uucuuaagaaccuugugagucucccaugcgugucauguauauucaugucauccaacaagaggcucuuggcaggucuuuccuaggga

SEQ ID NO: 4202544 - RNA, 80 nt, Human
uucuuaauugaugacugaagccugagcuuuuuuauuaucuaauguuccaugaaaggcucuauuguuuucauauuugagag

SEQ ID NO: 4202545 - RNA, 62 nt, Human
uucuuacaugccgaugacuucuuaaugaaaguccaccuaagaacuaucucuggcuguaggag

SEQ ID NO: 4202546 - RNA, 70 nt, Human
uucuuacuggcauggacuuccucauggacugcuacuucauggaugauagcuucauugcuuuggguaggga

SEQ ID NO: 4202547 - RNA, 96 nt, Human
uucuuagaggauugccuuugucuggcugcuuguuuugauggguguaaaacaaauaagauuagaccgagcagcccaacugaaagcgauagcugggag

SEQ ID NO: 4202548 - RNA, 61 nt, Human
uucuuagccauaauuguuuuucccagggacacaagaucgucuuggcauguuuggcuaagga

SEQ ID NO: 4202549 - RNA, 80 nt, Human
uucuuagguuuagcagucuccauauacauuuacaaaucauuaaauaauuugucaugguauuugugagcugcuccggugaa

SEQ ID NO: 4202550 - RNA, 105 nt, Human
uucuuauaucugcuuuaaagcuaucugguucuagaugagaugaugagaccugaugacucagucucauagguuuggaaccagguagcacuaccaagggcuuaagga

SEQ ID NO: 4202551 - RNA, 81 nt, Human
uucuuaucccuucaauaauucaacauuaaugguuuauuaaacagagccuuccuaaugggcuguuauugaccugaugcagag

SEQ ID NO: 4202552 - RNA, 85 nt, Human
uucuuaugccagccacagacuaguagugaguuucuuugguccucuguggaaaaguacuuugggcuauguuugggcuucauaagaa

SEQ ID NO: 4202553 - RNA, 67 nt, Human
uucuuauuccucuguucuggaacaucugucugcuucugagaaauggaacgagcagcaggaucaagaa

SEQ ID NO: 4202554 - RNA, 66 nt, Human
uucuucaacaaggacacuguuaaguaauacuggcuuuaaaaaauacagguacuuuguaaugaagga

SEQ ID NO: 4202555 - RNA, 57 nt, Human
uucuucagauggugagaccucccuucuguggacagucauucaccaaaucuguaagaa

SEQ ID NO: 4202556 - RNA, 69 nt, Human
uucuucagucccacuagccacauuucaagugcugaauaccuacauguggcuaguuuggaccaugaagaa

SEQ ID NO: 4202557 - RNA, 81 nt, Human
uucuucauggcaguggaaugggaugaguugauacuguaaucucuuaacucauacaugccuuuccagccauugucuggagga

SEQ ID NO: 4202558 - RNA, 57 nt, Human
uucuuccaaagcuuccaggagaggacccuucuuugccucuuccagcuucugguagaa

SEQ ID NO: 4202559 - RNA, 73 nt, Human
uucuuccugagaaaauagcauguguaguauuuuuggggacagcaaagcucagcaugcuauuucucgguaugaa

SEQ ID NO: 4202560 - RNA, 101 nt, Human
uucuucuaggcacaaugauuuacuauucacagauucaguguucucuuugacuucauagaacauaacuauugugaauaguaagaauugacuguguauaagaa

SEQ ID NO: 4202561 - RNA, 59 nt, Human
uucuucuccuuccugguuuucaggcauguguguaugcugagggaggaggaggaggaggg

SEQ ID NO: 4202562 - RNA, 90 nt, Human
uucuucuggcuggcacuaauauaucauguuuaagugaggacagcuucccaucaacuaggaacauuuauauuagauagcuaugugagugaa

SEQ ID NO: 4202563 - RNA, 60 nt, Human
uguuuuccacacaguagucaugcaaauaccuuuuuaggauguauacacguguugaaaaca

SEQ ID NO: 4202564 - RNA, 114 nt, Human
uguuuucccccuccuuuuggccuguagucugagcaagcaguguguugcuguugcuauuuuucauuagccccaacacacugcucgcucagauuaagcuuaugguacucauuaaca

SEQ ID NO: 4202565 - RNA, 72 nt, Human
uguuuucuaaaccaaguguccauauuaguacuuuacaguagugagugagaaaagcugggugccuagaaaaca

SEQ ID NO: 4202566 - RNA, 61 nt, Human
uguuuucugaauaaaggcaugagucaaugaguucaaugaguucagcucaguucagugagca

SEQ ID NO: 4202567 - RNA, 58 nt, Human
uguuuucuuggaugugaaacuagggcacuggguugcucuuagguaauacaaggagaug

SEQ ID NO: 4202568 - RNA, 80 nt, Human
uguuuugaacucuauaaguucuugagcucacuaauugaagagauuuuucaggccauagcacagggaaggaauucaaaaca

SEQ ID NO: 4202569 - RNA, 66 nt, Human
uguuuugacauacaugaaaaugcagcuuccauaagaaauggagacaacaaucaugugugaagaaca

SEQ ID NO: 4202570 - RNA, 65 nt, Human
uguuuugcuauaaauggucuaucuuuugagcccagccaauaugguaacugauuauggcucugaca

SEQ ID NO: 4202571 - RNA, 64 nt, Human
uguuuuguccuuuucuauauacccucaaacugagaagguguuucugguggagauggaaagaaca

SEQ ID NO: 4202572 - RNA, 60 nt, Human
uguuuuguuuuguuuucauggcaugauaccugcaaggccaggaaggcugaagccagaaca

SEQ ID NO: 4202573 - RNA, 85 nt, Human
uguuuuuacuccuaacuccaucucugugucugcuuccuaaagaaccugagugaccagcacaaggagguaguguaggguagaggca

SEQ ID NO: 4202574 - RNA, 61 nt, Human
uguuuuuaguaauuagaaaguaauucucugaagcagagaaugcucugguuugccaagaaca

SEQ ID NO: 4202575 - RNA, 66 nt, Human
uguuuuucacuguauguuccauuugguguuccaggggagaaaaaggauaaauacaguguuuaaaua

SEQ ID NO: 4202576 - RNA, 89 nt, Human
uguuuuuugauaccauguugcuuuugggaaaacaugccugaaaguaggcaaguuucucuaaagcaagaacuguaaaacucacagaaaca

SEQ ID NO: 4202577 - RNA, 66 nt, Human
uguuuuuuggguguauaucuucucuguaauacaggggaguggauuauguggacccaacagaagaca

SEQ ID NO: 4202578 - RNA, 69 nt, Human
uuaaaaaaaugucuuuaucucauguaacaugaggauuucuccauggacagagaaaggagauuucuguaa

SEQ ID NO: 4202579 - RNA, 68 nt, Human
uuaaaaguguugauugaccgaauaucaguaacuggaagaacugaauguucauuagucaacauuucugg

SEQ ID NO: 4202580 - RNA, 84 nt, Human
uuaaaauaccauugccuggauucuaccacagaacaauuaaauugggauuucugugguuaggauucaggcauggacauauuuuaa

SEQ ID NO: 4202581 - RNA, 66 nt, Human
uuaaaaucacuguuauugaucuuaaagggggagugcuucauuaauguaccuaaauggugauuuuaa

SEQ ID NO: 4202582 - RNA, 67 nt, Human
uuaaaauugcggugaauauuuccaaggacaaacaaaaugcugagggaaugagguacugcaacuuuaa

SEQ ID NO: 4202583 - RNA, 72 nt, Human
uuaaacaagauagcuuagaagauucauauuuauuccaaaugggaggcugaaucucucagaugucgauuuuga

SEQ ID NO: 4202584 - RNA, 72 nt, Human
uuaaacaccacagcagucccuaaaacagaaaagauucccagagggggauauacugcugucagugguguuuag

SEQ ID NO: 4202585 - RNA, 129 nt, Human
uuaaacagagcagaccaaacucugaagaagcucuuuucugccucacccagagguuguucccauagagaccacuggaaggcaacggagugagcugacacagaugguugugcgccuauccugucugguuaa

SEQ ID NO: 4202586 - RNA, 55 nt, Human
uuaaacauuuuugaugaucgauucuuauguuugaaucgggucagaauuuguuuaa

SEQ ID NO: 4202587 - RNA, 64 nt, Human
uuaaaccacugaguggagacuaagaaagggaacaaauauucaggguuuuuauaaaguggguuaa

SEQ ID NO: 4202588 - RNA, 95 nt, Human
uuaaaccuugcaggugucagugaugauaugaaagaaucuuuaaucuguuuguguugaaauucccccagaucauuuucacaucuguacauguuuaa

SEQ ID NO: 4202589 - RNA, 64 nt, Human
uuaaagcaaccauuugucucaauucuacguuuuaucagcaugaaagucaauaugguagcuuuga

SEQ ID NO: 4202590 - RNA, 77 nt, Human
uuaaagcagcauucaugaugacaacaggaagacaauuugguucuaucuucuuaugucaagaaugaauauugccuuga

SEQ ID NO: 4202591 - RNA, 61 nt, Human
uuaaaggccaaagugcuccuuuuagaggaaaauacuucuagcacuauacuguggccuuuaa

SEQ ID NO: 4202592 - RNA, 67 nt, Human
uuaaaguauuguuaagauucaacugucauuuaagugcacaguucuaaaucuuggauaauagauuuga

SEQ ID NO: 4202593 - RNA, 102 nt, Human
uuggcagaagcacugcaaagccacaaugaaaucaguuuuaacuuacauugaaggacuuuaauuguuagauuguggugucauugcaaguguuaauucagucaa

SEQ ID NO: 4202594 - RNA, 64 nt, Human
uuggcagagggguuucugguggcggcauccccuagaguccaggccacaggggcuccccugucag

SEQ ID NO: 4202595 - RNA, 68 nt, Human
uuggcagggcagcuuccauagucuggccauagaaccacaggccugagccacuggaaggcccuuuacaa

SEQ ID NO: 4202596 - RNA, 107 nt, Human
uuggcauaucacagguaaaagaaaaccacuaggugucauuauagaccagauacuaucuagguaucauuuuacugugacauuuugguuuccugaaagauagaugcuaa

SEQ ID NO: 4202597 - RNA, 59 nt, Human
uuggcaucaguguaggaccuguuugcaagucagacagauccuugguuauuugugcacaa

SEQ ID NO: 4202598 - RNA, 55 nt, Human
uuggccacaauccaagccuugggugggaugaagccaggccugguucacuggccaa

SEQ ID NO: 4202599 - RNA, 97 nt, Human
uuggccaggauagucuugauuuucugaccuugugauccacccgccuuggccuccccaagugcugggauuacaggcgucagccaccucgccuggccaa

SEQ ID NO: 4202600 - RNA, 77 nt, Human
uuggccauuuuuugcauccugugugugaaaguuggagaacuuggacucagucauaaaaggauguagcagagagccaa

SEQ ID NO: 4202601 - RNA, 56 nt, Human
uuggccccucuuguggcacauacggugggcugugggggcccagaagagagggugaa

SEQ ID NO: 4202602 - RNA, 102 nt, Human
uuggcccuuaacuuuuagaaguucacacauuuaaacauuccaucuugacagauuuacccagcguuugagugucuguggggcuucucuaaagcucagggucaa

SEQ ID NO: 4202603 - RNA, 62 nt, Human
uuggccucaagaaugccaauuacagaugcucugcugucugauuagagcauucuugaguccag

SEQ ID NO: 4202604 - RNA, 64 nt, Human
uuggccuggagaggcgcugcagaggacccugcacaucuggucguucucaguacuuccaggacag

SEQ ID NO: 4202605 - RNA, 76 nt, Human
uuggccuuaaccucucugugccucaguuuccucaucuguaaaagagggauacaguguacagggauaguagugucaa

SEQ ID NO: 4202606 - RNA, 59 nt, Human
uuggcgucuuuuccauggaaagccugcugucuuucucugggcuugggagaagaggccag

SEQ ID NO: 4202607 - RNA, 73 nt, Human
uuggcucaggcauauacucucagaaaaaaauuuucccauaguuuucuuuucucuaagguauugaaugggccaa

SEQ ID NO: 4202608 - RNA, 74 nt, Human
uuggcucaggcuuucauuguaaaugaugguguaaauauccaccaacaguucaggaauaaugaagguggagccag

SEQ ID NO: 4202609 - RNA, 81 nt, Human
uuggcucccaauccccugccgucuccaaucauugcaaugcaaauucgauagaaaagagcugcaggggucccuggcagcuga

SEQ ID NO: 4202610 - RNA, 57 nt, Human
uuggcugccgagcgcaucccggcugcgccccggcggggaggcgccgaggguagcuaa

SEQ ID NO: 4202611 - RNA, 87 nt, Human
uuggcugcuacagguagauacauacuucuaaaaaagccuaagaucacuguucuuagaaguuuugaucugucuugaagaaguagccaa

SEQ ID NO: 4202612 - RNA, 85 nt, Human
uuggcugcuccauguguucucagggaaaauaaaacugcaaccucagauuguagcugugugcccaugguggaggcaugcaggccaa

SEQ ID NO: 4202613 - RNA, 55 nt, Human
uuggcugcuugaaauaagacauuguggcacaucaaccucucuucuuggcagucaa

SEQ ID NO: 4202614 - RNA, 64 nt, Human
uuggcuuagcagcaauggcaucaacuaguugcuaauuagaaaugcccagauucugcuagaucaa

SEQ ID NO: 4202615 - RNA, 61 nt, Human
uuggcuucccagagcuuacgcugacucauuugagaaacagaaaaagugacuggcaggccaa

SEQ ID NO: 4202616 - RNA, 66 nt, Human
uuggcuucuaaauuaguucaauggaugauagaaauguucuuuuguugauggaauuaaugaugcuaa

SEQ ID NO: 4202617 - RNA, 79 nt, Human
uuggcuuuaccuccauucuuucagugucucauguuuucuuaauucugaacaugagaaagagaauggacuugagagugaa

SEQ ID NO: 4202618 - RNA, 67 nt, Human
uugggaaacaguauagcuaacaaacagauuggcuuuggagucagugggcaagcugugcuguuacuaa

SEQ ID NO: 4202619 - RNA, 76 nt, Human
uugggaagaaagggucacugaaagaggagguggcuacucaccugucaagucugcuuagauguugcccugguuccaa

SEQ ID NO: 4202620 - RNA, 56 nt, Human
uugggaagaggccccuggauuccacagagacugguggccaaccgggcagcucccag

SEQ ID NO: 4202621 - RNA, 88 nt, Human
uugggaagcagcucacuaacuucauauaaaggucucuaaucuaauuagaugcaggauuagaaaguugccucugaguugcuuuucucaa

SEQ ID NO: 4202622 - RNA, 76 nt, Human
uugggaagcuguguauuacagaauauuuaggagcaccccugacccaugucugccagauaccagcagcaccucccag

SEQ ID NO: 4202623 - RNA, 61 nt, Human
uugggaaguuaucagaaugcugcuuucccuggcaucgucuuggagggcuugauggacccga

SEQ ID NO: 4202624 - RNA, 77 nt, Human
uugggacuacauuuauagucgucucaguaauaaacaacuauacaacuuuuauuauuguaagggcuauaaguccacaa

SEQ ID NO: 4202625 - RNA, 64 nt, Human
uugggacugaucauuuuugaacccuauuugauauguucuauaucucaaagaagauucagcucaa

SEQ ID NO: 4202626 - RNA, 72 nt, Human
uugggagcaggugugcuagggaagcuaccaauaacuaagagcugaaguuucuaacucuacacuagcuuugga

SEQ ID NO: 4202627 - RNA, 57 nt, Human
uugggcagucuggcugcagagucuggguuuuauucacuaccuguccugacugccugg

SEQ ID NO: 4202628 - RNA, 62 nt, Human
uugggcaguuagccuugacccauaucuuuuaggggucaucuuccuaguguuaacuaccccaa

SEQ ID NO: 4202629 - RNA, 80 nt, Human
uugggcccauaauuuagaugaugugacucucuugcaugggcccuccccauaaagguagugugacauauuguugagcccag

SEQ ID NO: 4202630 - RNA, 94 nt, Human
uugggccuggugccaggguuaaaacugauauuaugggugaucauacagcuugguggcucauuuuagucagucuuuaacaccacagaccucccaa

SEQ ID NO: 4202631 - RNA, 55 nt, Human
uugggcucuuguuaccacugacaugaauuguccagugcuggaccagagcacccag

SEQ ID NO: 4202632 - RNA, 76 nt, Human
uugggcuucuuucgucucggaagucuucucuugaagagaagacuuuaagccgagauuaggaugaagugagggccag

SEQ ID NO: 4202633 - RNA, 69 nt, Human
uuggggaaugaacaaucuguugacuucuguuauuuggaaugaagacauguuguuuguugaauucucugg

SEQ ID NO: 4202634 - RNA, 63 nt, Human
uuggggaaugaggcuacuuuuucagaagaucaauagaaaugggaagagaguccucauccugag

SEQ ID NO: 4202635 - RNA, 72 nt, Human
uuggggagccugugggaugagaugugucagagaagaggccagggcaggaccauuucacacggggcuuuuuga

SEQ ID NO: 4202636 - RNA, 75 nt, Human
uuggggaucauuacagagacauccagaacacagauaagcaaauaugugcguggauuccuguacucauuucucuaa

SEQ ID NO: 4202637 - RNA, 73 nt, Human
uuggggauuagugacauguuauggacuggcuacuuugaguagcacuguucuagcauguuuuuguguacuccaa

SEQ ID NO: 4202638 - RNA, 87 nt, Human
uugggggcaggguaagcaaugucugaccguuuugcccaggcgugucucaaacuccugggcucaaggcaucuuaccucugccucccaa

SEQ ID NO: 4202639 - RNA, 63 nt, Human
uuguucuugucuuugccuucaccuaagaaaauaaugaagggugguaaauaaggauaagaagga

SEQ ID NO: 4202640 - RNA, 95 nt, Human
uuguugauuauugauguaguaguguuuuuuaauugcugcaugacagauuacuaccaucauaguggcuuaagcaacacacauuaauuauuucacag

SEQ ID NO: 4202641 - RNA, 56 nt, Human
uuguugcguugcuugcccauuuguuggacccuagcagggcaaagucaggcuaacaa

SEQ ID NO: 4202642 - RNA, 72 nt, Human
uuguugguaauaaugaaugcuuuauaaagugucucugcaacaaccacuaauuagcuucauuauagcccacag

SEQ ID NO: 4202643 - RNA, 63 nt, Human
uuguuggugaauaggguggaauugggacaaguaggaggagguuuuacccuuuuucauaaauaa

SEQ ID NO: 4202644 - RNA, 61 nt, Human
uuguuguccauugugacaaguguggccucugacuggggccaauuguugcacuuggauacaa

SEQ ID NO: 4202645 - RNA, 57 nt, Human
uuguuguguugauuaucuagacuuauggaagugcuagagaaaauguuaauacaguaa

SEQ ID NO: 4202646 - RNA, 57 nt, Human
uuguuguugcuuaacaguaucuaaaccauuggguaagacacaguauaagcacaacaa

SEQ ID NO: 4202647 - RNA, 114 nt, Human
uuguuuagaaagaguuagcugauauuuccauccauuagucuuaaaacuaagcugacuggaaagaacagcuauagauggacugaagaggaaauaaugcuauaccuucaugaacaa

SEQ ID NO: 4202648 - RNA, 73 nt, Human
uuguuuagcuaauauguggcauggaguaaggauaucauugucacauucaaguuuuauauccauggcuugauaa

SEQ ID NO: 4202649 - RNA, 77 nt, Human
uuguuuauauugguuugaaucauuacaauagauaaguccagaaggauaaguuggugcuugauugcuagucuaaauaa

SEQ ID NO: 4202650 - RNA, 61 nt, Human
uuguuuauuccaccuccauuuuccuagggaaggaauucuaguaaaccgagggaauaaagaa

SEQ ID NO: 4202651 - RNA, 79 nt, Human
uuguuucacgcuuuucuguggauggugagcaaauggcugauucuuuauggcccucagagccccaggaggguguggacaa

SEQ ID NO: 4202652 - RNA, 111 nt, Human
uuguuucagugugggaguagugguggcuggaagucagaaaugggaaagagguuucuucucccuucuuugccuucugaauuuuaguuuucuggggcucccauuucucugcaa

SEQ ID NO: 4202653 - RNA, 73 nt, Human
uuguuuccauaauaacugacuuguauaaaggccauuuuuaaaggccauuacaggacagauguuuacaggacag

SEQ ID NO: 4202654 - RNA, 79 nt, Human
uucuuuuagucauucagggaagcugauuauacugacaaaaaauaaguauguuuguuaucuucugggccacuaaaaugaa

SEQ ID NO: 4202655 - RNA, 110 nt, Human
uucuuuucccuuaaauguucucugucuuuaauuuuacuaugacuggggaccuuccagggccagacauuguguaagaugcugggauagaugacuuagauguggucaaagaa

SEQ ID NO: 4202656 - RNA, 64 nt, Human
uucuuuuccucaucuguaaaaugggggaaacaauaauauuaauccaugaguuugaggaaaagag

SEQ ID NO: 4202657 - RNA, 89 nt, Human
uucuuuucuuuucauuguaaccucgcccucccauugauaauugguugccuaaccaauucaucuggguagguagccugaacaguugagga

SEQ ID NO: 4202658 - RNA, 69 nt, Human
uucuuuuuucugugcaguucuugucuugacuuaugaaagccaaauauccauucuguauggggagaugaa

SEQ ID NO: 4202659 - RNA, 66 nt, Human
uugaaacaauuaccuuaacucuuaacccuucuuugggccaacugaguugcugguaaauguuaucaa

SEQ ID NO: 4202660 - RNA, 84 nt, Human
uugaaacucaggucccuuggaggaagcucuaggcucugaaauuacuucucucggccucaguuucuccauggguuuuggauucag

SEQ ID NO: 4202661 - RNA, 111 nt, Human
uugaaauaguuuauuuguccacagugugauuucuguugagaaacaugggcucaccgacuuuugggucucuucuaacacuagaaauuccucugguuuuuuagacuauuucaa

SEQ ID NO: 4202662 - RNA, 59 nt, Human
uugaaauguuuaucucuccugcugaggguaucucagccuugguaugauugacauuuugg

SEQ ID NO: 4202663 - RNA, 79 nt, Human
uugaaauuccauuguuucuuagcagugcugagaagaaugaggaaaguauucuuccuccacgcugggaauggauuuucaa

SEQ ID NO: 4202664 - RNA, 86 nt, Human
uugaacauuuuucuccccagggguauggguauuauguucacacauaagucacauuuuuaacccuuuuaggaggagccaaaugucaa

SEQ ID NO: 4202665 - RNA, 59 nt, Human
uugaacuguaagcaugucugcccuuugcucuggagggagauacuaucuuuacaauucaa

SEQ ID NO: 4202666 - RNA, 67 nt, Human
uugaacugugucuuccuguccuaccucuguguaccuuuuuagaggugugaagaguugacacauucag

SEQ ID NO: 4202667 - RNA, 64 nt, Human
uugaacuuuguguauaccuuguccugguaaauuuaauggacaucucauuuauacagaaguucag

SEQ ID NO: 4202668 - RNA, 56 nt, Human
uugaagacacagacauauagaggcuccaccuacuuauuauauugcugugucuccag

SEQ ID NO: 4202669 - RNA, 90 nt, Human
uugaagaucagagggagcacaguggaagaagcacugaacuuggaauaagaaaacucccaguuccauccuuccacugcccugugaucucag

SEQ ID NO: 4202670 - RNA, 63 nt, Human
uugaagaugcugucucuuccagauccuucaagauuggaaaaagaaggugaugagcauuuuuaa

SEQ ID NO: 4202671 - RNA, 129 nt, Human
uugaagauguuauauuaaaauaugccauuguaaguugaaacauuuuugcauaaauuuuuaaaauucucauauucagagaaagaaguaugugagaaauuauccauaaaguggcugauauggcauucugaa

SEQ ID NO: 4202672 - RNA, 64 nt, Human
uugaagcagaguuagcuugucaccugccucccuuucccgggacaacagaagcugaccucuuuga

SEQ ID NO: 4202673 - RNA, 59 nt, Human
uugaagcucuaacuuccaauaccucagaaugugacuguauuugaagacagggucuuuaa

SEQ ID NO: 4202674 - RNA, 70 nt, Human
uugaaguacaaauuuugaagagcuugcuucuguuucuauuuuagagaguuacacaaaauuucuauuucag

SEQ ID NO: 4202675 - RNA, 59 nt, Human
uugaauaacuuuuaaaagacccuggugaagcaccauggaauauucuaugaguuauucag

SEQ ID NO: 4202676 - RNA, 129 nt, Human
uugaauagguuaugugagaggugacuggguuauuugggaggugacugguuuaucuggcagugacuggguuaucuggggugaauagguuaugugagaggugacuggguuauuugggaggugacugguuua

SEQ ID NO: 4202677 - RNA, 106 nt, Human
uugaaucuaauguuuguagaaagauucauguuagcccacauguagaacucgauuuauaggcaagagaccuugaaacucuuugaauucaaauguuggaagccuucaa

SEQ ID NO: 4202678 - RNA, 65 nt, Human
uugaauggcacaagaguaaacuguuguauuacuucacacagcagagcuauucuugugcaauuuga

SEQ ID NO: 4202679 - RNA, 64 nt, Human
uugaauggcuguaguuaccugaugaaauaauaaguuauuaauuccagaacuuugcagcccucaa

SEQ ID NO: 4202680 - RNA, 99 nt, Human
uugaauguugcaucaggcacuagaguugcaaaagauucuccgucaaucagaaaggggcaggagaaugauauauagcucagugagaugauguaaacucaa

SEQ ID NO: 4202681 - RNA, 58 nt, Human
uugaauuguuguggaacagugcagucacauuuuaugcaagguuuguacaacauuuuaa

SEQ ID NO: 4202682 - RNA, 76 nt, Human
uugacaaacacgguggcucacagcaauguuuccugguaauaaguucguuguuugugagucacgauggauuuggaaa

SEQ ID NO: 4202683 - RNA, 78 nt, Human
uugacaaguucuugaagacuuuaaauagcaagcaagggagaaaugguuuucuguaguauauagaguuagaacuugcag

SEQ ID NO: 4202684 - RNA, 70 nt, Human
uugacacuaaacagagaucuuaauuccuguaucuucaugcaucagaauuuggucuuaguggagaugucaa

SEQ ID NO: 4202685 - RNA, 67 nt, Human
uugacagcagaauccauucccaguuaauuauuauuuuaauacuugauggugucugucaaauugucga

SEQ ID NO: 4202686 - RNA, 101 nt, Human
uugacagcggcagauauuuuugaauaugauugcaaauuuggcuugucauggaguaccugccaaguaccaugaauguauuugaugaauaauucugcugucaa

SEQ ID NO: 4202687 - RNA, 57 nt, Human
uugacaucuuugaucucauuuagacccagagauggggcugaauuuauuggauguuaa

SEQ ID NO: 4202688 - RNA, 58 nt, Human
uugaccacuaggaauaucuuaccacaagaacguaucugucagugggaccuguggccaa

SEQ ID NO: 4202689 - RNA, 77 nt, Human
uugaccagcuguaugauggauguggcucuggagcugcucccaggcaggguucagccccaagagccucaucuggucaa

SEQ ID NO: 4202690 - RNA, 106 nt, Human
uugaccagguuaaaagagcugccaugacuccaggccaaguggucaucucaggugcuccuugugcauauagaguuagauggcuggaguuccucuuagccaggauuaa

SEQ ID NO: 4202691 - RNA, 57 nt, Human
uugaccugggcacagugagcaugagauacauuuuguuguaaucgcuguuuaggucaa

SEQ ID NO: 4202692 - RNA, 92 nt, Human
uugacguucccuagcaugcaaaguaagucaugcaugaacggugcacaauaauucuuguuuugcuuugauguguuaguucuuaaggauaucaa

SEQ ID NO: 4202693 - RNA, 87 nt, Human
uugacuaaaucuauguugaaauuuuuuagaaaaucuggaagcucaauaggcuuccucagcugagagaugauauagcuuaaugguuaa

SEQ ID NO: 4202694 - RNA, 59 nt, Human
uugacuauacucuggcggaaaaaggagacaaugucuucaauuccucaggugugaguuag

SEQ ID NO: 4202695 - RNA, 55 nt, Human
uugacuucagaauguugaugguagcaucaacuguuuuaccauccucugaaguuaa

SEQ ID NO: 4202696 - RNA, 75 nt, Human
uugacuugcuaaaaguaaacugucuacucugugcuagccauuauaaugggugcuagggauauaguggcgagucaa

SEQ ID NO: 4202697 - RNA, 82 nt, Human
uugacuugggaaagaugucucaaagacaucuccugcuuguaaaggcagguguuuuaagacauugaacccauccuuagguuaa

SEQ ID NO: 4202698 - RNA, 67 nt, Human
uugacuuuuccacuguagagauguugaaguuaaaauaauuucaacaucuuggagcuggaacauacaa

SEQ ID NO: 4202699 - RNA, 67 nt, Human
uugagaaaagcuguguaaggaucauguuacauacauugugcuuucucuuacagaguuaccuucuuaa

SEQ ID NO: 4202700 - RNA, 96 nt, Human
uugagaaauuauugcaccugucucuguguugggacauuuuuuuggucccagguaguuggaagagacaaagcuguaaauuauuuacuaguuuuucaa

SEQ ID NO: 4202701 - RNA, 65 nt, Human
uugagaagauugggcagaguggaguuucaacaaugacuucugucacccuuccuuagucuuuucag

SEQ ID NO: 4202702 - RNA, 102 nt, Human
uugagacagagucucgcucugucacuaggcuggagugcaguggcgugaucucggcucacugcaaccuccgccuuccggguucaagcgauucuccugucucag

SEQ ID NO: 4202703 - RNA, 95 nt, Human
uugagacagagucuugcucugucacccagagugcaguggcacaaucucggcucacggcaaccucugacuccuggguucaagugauucugucucag

SEQ ID NO: 4202704 - RNA, 104 nt, Human
uugagacagaguuuugcucuuuuugcccaggcuggagugcaauggcgugaucucagcucauugcaaccuccgccucccagguucaagcaauucuccuaccucag

SEQ ID NO: 4202705 - RNA, 100 nt, Human
uugagacagggucucucucugucucccaggcaggagugcaguggcgcaaucacagcucacugcagccucuaccuccugggcucgaguuauccugucucag

SEQ ID NO: 4202706 - RNA, 98 nt, Human
uugagaccaugaguuuuggugucuuucuaaauguuccuugauuaucuuuaaagguguuggaaauauguaggaacucauauuuaaacuuaggguuugga

SEQ ID NO: 4202707 - RNA, 122 nt, Human
uugagacgauuagagaucaugguuauuagauaagccucaggaggauguuuuucuuggguugcucacaagcauuuugaaagagucguguuccagguuugagaucccauguuucuuccucuuaa

SEQ ID NO: 4202708 - RNA, 103 nt, Human
uugagacggaaucucacucugucgcccaggcuggagagcaguggcacgaucucggcucacugcaaccuccaccucccggguucaagugauucuccugccucag

SEQ ID NO: 4202709 - RNA, 102 nt, Human
uugagacggagucucacucugucgcccaggcuggagugcaauggugcuaacucggcccacugcaaccuccgccucccggauucaaggauucuccugucucag

SEQ ID NO: 4202710 - RNA, 56 nt, Human
uugagacggaguuuugcucuuguugcucaggcuggagugcaauggcucagucucag

SEQ ID NO: 4202711 - RNA, 76 nt, Human
uuucaugaagguaguauauauccaaaaugcauuacuuugucuugacuuccuuuggauauguuucugucuucuggaa

SEQ ID NO: 4202712 - RNA, 67 nt, Human
uuucaugggguuguacugaaugggaauauguaaaguuucauuuguuauuuacaacaauccuaugaga

SEQ ID NO: 4202713 - RNA, 108 nt, Human
uuucauuagacuuguuuugaaacucaugaucaucacuguaaauaccucuguguggaaagcaaugaaauaaaaccaaaagaaguagugaagucauggcaagcugugaga

SEQ ID NO: 4202714 - RNA, 58 nt, Human
uuucauuagccuucacagagcacuuuguauagagugaggcacagaguggcuggugaaa

SEQ ID NO: 4202715 - RNA, 130 nt, Human
uuucauucacaaguggacuaaguaaaagcauacagcagggcgcugugaugaacacgcuuuaagguggcuucaacuccuggugcucaugccccgugugugugauuugcuucuaacuaguagaauauggaaa

SEQ ID NO: 4202716 - RNA, 56 nt, Human
uuucauucuuugaaucugagguagucauaugauugacuuuggccaguugaaugaaa

SEQ ID NO: 4202717 - RNA, 92 nt, Human
uuucauuugacaggagccaaaauaggauaauagcgccaacaguuuuuuaaaugaaguccuaauuauggcucauagucucacuuaugaugaga

SEQ ID NO: 4202718 - RNA, 70 nt, Human
uuucauuuuacgcuuauaggacagccucuuuugcauuugaaugagacuaccuguaauguggcaaauggaa

SEQ ID NO: 4202719 - RNA, 58 nt, Human
uuucauuuuucugcgaguagcauguguguauuacacugcuucagucagagaaauuaaa

SEQ ID NO: 4202720 - RNA, 76 nt, Human
uuuccaacacauuccagugaaucacaguuagaugccagacuggcagacgugacacauucuggacaugguuaggaag

SEQ ID NO: 4202721 - RNA, 79 nt, Human
uuuccaagucuagcaaauagaauucagaaagggaauaucgucucuguuauucugucuauugccauaagaauccaggaaa

SEQ ID NO: 4202722 - RNA, 55 nt, Human
uuuccaauaaggucaccuuccuagguucugggauuaggacauaucuuauuggaga

SEQ ID NO: 4202723 - RNA, 81 nt, Human
uuuccacauccuuugugucccaugcggccuacacuccagggagguggcacaaggcuuacacagcagcaggcaauguggaga

SEQ ID NO: 4202724 - RNA, 130 nt, Human
uuuccacccaaauuauuguaguuuuugucauuuuugguguggcugaagguaugaguuuuaucuuggaaguccaaagcuggaaaaaauuccaucucaguuccaguuaaagugagaaaugcuauggaggaga

SEQ ID NO: 4202725 - RNA, 86 nt, Human
uuuccacuaaguggaccagaagacugaagcucacauaagcuacaagccuugcucaagccucuuuuucaagguccacaagguggaga

SEQ ID NO: 4202726 - RNA, 70 nt, Human
uuuccacuacgucugcaucugacuggucauuuugggauccucuggccaguagauaggcaggcaaaggaaa

SEQ ID NO: 4202727 - RNA, 72 nt, Human
uuuccacugagccaggagcaauaucauccaugaaaagaugagauggcgguguagcuaggcaagaacuggaga

SEQ ID NO: 4202728 - RNA, 85 nt, Human
uuuccagauuucucaaauugcaugaguagcuugcaagcugacauaauuaugcugcucucauuagcaauuuaaguacagcuggaaa

SEQ ID NO: 4202729 - RNA, 60 nt, Human
uuuccagcuucaaagaacaaagggaggcuuaauggcuuuuaugcuguaguuugaaggaaa

SEQ ID NO: 4202730 - RNA, 65 nt, Human
uuuccaggugguuugauaggauaacucuucagagaguuuaacuuuggaaaacuauauucuggaga

SEQ ID NO: 4202731 - RNA, 55 nt, Human
uuuccauaaucucuuggggaguggcaggaaugaauuucucaccaugguauggaaa

SEQ ID NO: 4202732 - RNA, 56 nt, Human
uuuccaucaguggagagcauuauaagacgugagcuuuagaaauaucacuguggaaa

SEQ ID NO: 4202733 - RNA, 72 nt, Human
uuuccaucucuucuuuugcuucccugacuuugccaugagaacacguccaggcuagccugguagagaaugaaa

SEQ ID NO: 4202734 - RNA, 101 nt, Human
uuuccaugggggcucagccauguugaagcauguaugucaaacugauguaagaguuugacagaaauguauuugcaugaauugcugaagagccuccugagaga

SEQ ID NO: 4202735 - RNA, 89 nt, Human
uuuccaugugcuucaccuuugcagcuccauuuuaauggcuggacaugcuuagcuucucagauggacuguuaguacggccauuauggaaa

SEQ ID NO: 4202736 - RNA, 107 nt, Human
uuucccaagcauuuucuccuucauguuccucccuguaugcccugugcaaugguguacagccuggcacuacccuggggggaggagaguuaaucaggcugacaaggaag

SEQ ID NO: 4202737 - RNA, 55 nt, Human
uuucccagaauccuguucuguauuugacauuucuugcagagaugggaguuggaaa

SEQ ID NO: 4202738 - RNA, 55 nt, Human
uuucaaauggagucgugaaaugaagggcacccuucauauccgauuguauuggaaa

SEQ ID NO: 4202739 - RNA, 57 nt, Human
uuucaacauaccucaguguauguacauuguauaaaacauugaauguaugugaugaaa

SEQ ID NO: 4202740 - RNA, 70 nt, Human
uuucaacauugauugagcacccauuauguaaacuagacauguauaugauuggcugcuaucagugaaggaa

SEQ ID NO: 4202741 - RNA, 62 nt, Human
uuucaagaagcaaauuaaaguccacauguuuagugaacuucucaguguuugucuucuuggga

SEQ ID NO: 4202742 - RNA, 79 nt, Human
uuucaagaguuaacgcaugguuucucugcugaugguggcauaucccagggcaaaugagaucauagcauuaaugaggaga

SEQ ID NO: 4202743 - RNA, 56 nt, Human
uuucaagcuccagggucuauguuuggaucuuuaucaucagccuugaaugcuugaaa

SEQ ID NO: 4202744 - RNA, 59 nt, Human
uuucacaaaggaaaagaacuguaugguccauaaugacagucuuuaauuucuuuguggaa

SEQ ID NO: 4202745 - RNA, 68 nt, Human
uuucacaagacagucuuggauuccaggagucauguccugauuccugcuauucacagggcuaugugaaa

SEQ ID NO: 4202746 - RNA, 63 nt, Human
uuucacauuggcaaacgggguugcaaagugcucuucgugcucuuuggacagugccuuguggag

SEQ ID NO: 4202747 - RNA, 62 nt, Human
uuucacauuuuauacuuaagccuauuuuccauuuugaguuaauuuuuguaugaggugugagg

SEQ ID NO: 4202748 - RNA, 74 nt, Human
uuucaccuaucgaucuuugaauaauuagaagacauuguacaaucaauguguuuauuuagugauuuauugugaga

SEQ ID NO: 4202749 - RNA, 62 nt, Human
uuucacucccucguuuuuccucucagagagaaaaaaauuagggaggaaccacugggaggaga

SEQ ID NO: 4202750 - RNA, 60 nt, Human
uuucagaaacgauuaugaacacgauuuuaagaaguauaaaugucauuauuguuucuggag

SEQ ID NO: 4202751 - RNA, 58 nt, Human
uuucagagagaucaacauagcuuacauuuuguuauggcuaugguugguuguucugaga

SEQ ID NO: 4202752 - RNA, 61 nt, Human
uuucagcauuuuugcugcugcccacuauucauaugggugguaugagcugaaauugcugaag

SEQ ID NO: 4202753 - RNA, 67 nt, Human
uuucaggcagaaaaaucacuaauuuccacauuuaaaggaaaaauaauuggugcauucugucgggaaa

SEQ ID NO: 4202754 - RNA, 64 nt, Human
uuucaggccucuaaagggaaagcauuaagauccuagucuuggcuuucuccuuauaggccugaaa

SEQ ID NO: 4202755 - RNA, 70 nt, Human
uuucagggauauguuaagcauuugagcuaaaaauuauaccuuugguugaaacauaaaauauuuccugaaa

SEQ ID NO: 4202756 - RNA, 73 nt, Human
uuucagggcauccagaaagacacauuaaccaaagacugcugaaugcuuugggagagaauucuggugacugaaa

SEQ ID NO: 4202757 - RNA, 75 nt, Human
uuucagggcuuuucuugugacuaucgaagggucaacaggugugauucuucacaaauauauagaaggguuguggaa

SEQ ID NO: 4202758 - RNA, 89 nt, Human
uuucagguucagugacuuuucccuugcaacaaagggaggcucaagagaccuuguuuuggaaccaaaggauguuauugaaccuuuugaaa

SEQ ID NO: 4202759 - RNA, 67 nt, Human
uuucagucaccaacaugguucccaggggucuaggcuguggccucugcuggagcaaguggugaggaga

SEQ ID NO: 4202760 - RNA, 111 nt, Human
uuucaguccaauaauagaggcaagauucggggcccacgaugcauuucauuuacuuuuggguaauaaaccaggaaugucaaguagaugugcgugggcuucgaugacaugaaa

SEQ ID NO: 4202761 - RNA, 56 nt, Human
uuucaguugcagugguugucuaacaguucugcuguauggacauuggcaaacugagg

SEQ ID NO: 4202762 - RNA, 71 nt, Human
uuucaguuuaagacaaggggguguaguggggaauuaucguguaaaacuacaccaguaucuuaagcaugaaa

SEQ ID NO: 4202763 - RNA, 71 nt, Human
uuucauaggaagaagcagccuugcuuaaauugagaaagucagacugaacaaaacaugguucuuccuagaga

SEQ ID NO: 4202764 - RNA, 76 nt, Human
uuucauaguuguuuuucugggguuacuuagaauuugagaguccgugagaagcauuaggaagaacauuacugagaaa

SEQ ID NO: 4202765 - RNA, 80 nt, Human
uuucaucagauggauuuauacuauuucuggaaugcugccuuucauuuacuuugagguggauaaaaccuaaucguuugaaa

SEQ ID NO: 4202766 - RNA, 114 nt, Human
uuucaucuuuauaguuccagauccagcuaagauuacacucugguugcgugacugaacaaaucuguuugcagggagagaugugguguuggaauugugaaccuauggagaaugaaa

SEQ ID NO: 4202767 - RNA, 67 nt, Human
uuucauuuauauauugcuuacaaguacgugguaauuugaacuucaguaggugauaugugcaaggaga

SEQ ID NO: 4202768 - RNA, 76 nt, Human
uuucauuuaugagcugaaccaugaaacuugcccuuaucuacuauugguuucccagugguacaguuuauauaggaaa

SEQ ID NO: 4202769 - RNA, 83 nt, Human
uuuccaacacaguaacuccugaccccucgcagucugagaaguggugguaaguagugguggguaagaguugagguguugguaaa

SEQ ID NO: 4202770 - RNA, 71 nt, Human
uuuccaaccccauggaugaccugcuuguuucaaacaguauuuguaaaacaagcuuuaugguucccuggaga

SEQ ID NO: 4202771 - RNA, 59 nt, Human
uuuccaacuguaccccaguguuuaugguaaagugguaccaggaauuggacaguuggaaa

SEQ ID NO: 4202772 - RNA, 64 nt, Human
uuuccacaauguuuuugcaggaaaaaacuuucaaacauuuuagugcuaaaaacuuugugguaga

SEQ ID NO: 4202773 - RNA, 129 nt, Human
uuuccacugccccuuccacaauucagcauguuucaagaggcugaagcaaauagauugaaugaacacuacacauccauagcauucauugucucuguuugccuucagcccaugcucuguucugagaugaaa

SEQ ID NO: 4202774 - RNA, 87 nt, Human
uuuccagaauaaaacuguaaguuugaggggaaaguggauauuuggucucaguuuccaccuucacuuucacuuuaaauagccuggaag

SEQ ID NO: 4202775 - RNA, 101 nt, Human
uuuccagauagcauuuaguugccucaagauuuuuuauugauacaucuuuccccaugauucaauguuuguuuuugaugguaaguguauuuuaucuuaugaag

SEQ ID NO: 4202776 - RNA, 83 nt, Human
uuuccagauccucuuauugcauauuguacuugaauggacucucauugccaaaguuuugauuaaguaaaugucguaacuggaaa

SEQ ID NO: 4202777 - RNA, 59 nt, Human
uuuccaggcagaggaguugugauaaugaggauuaaggcauacagccuauugccugggag

SEQ ID NO: 4202778 - RNA, 64 nt, Human
uuuccaguaaguggcaaggagcuuaauguacuaauauuuucauguuuuguccaccugcaggaag

SEQ ID NO: 4202779 - RNA, 82 nt, Human
uuuccagugauaaauaagacugaauucuaaaugugaugagauaccuguccauuauagaggguuacaguuaauaacauggagg

SEQ ID NO: 4202780 - RNA, 64 nt, Human
uuuccauacguuuccacuguuugaucugugagaaagacuaggggacaaggcaggagauuggaga

SEQ ID NO: 4202781 - RNA, 123 nt, Human
uuuccaucuccucuugaguucucuaaauuauguuuggcaguaagcaaaaguuaauacacugccugaugugguucuaaauuaauagaagaaauauuuaagacaauuauacacaggggaaagaaa

SEQ ID NO: 4202782 - RNA, 75 nt, Human
uuuccauuuguuauguucuaggaugugugugcauaacaagauguacaauguaauucugauuauguuaaauugaaa

SEQ ID NO: 4202783 - RNA, 58 nt, Human
uuucccaacugggcccuccagugggucuguuuuucuauccaggugcucaaaugggaaa

SEQ ID NO: 4202784 - RNA, 59 nt, Human
uuucccaggcaaggacaugaaacugaggaagagaauucaccaccuacuugccugggagg

SEQ ID NO: 4202785 - RNA, 75 nt, Human
uuucccagucacugcuuugucccuguguggcccacagaagggcuguguucugacucagugaguggaggugggaag

SEQ ID NO: 4202786 - RNA, 63 nt, Human
uucaccauguauuuauugagugcugucuagcacuaugggaggcacugaagcuacaauggugag

SEQ ID NO: 4202787 - RNA, 59 nt, Human
uucacccugcuggaggcagcugacucagaaaccugaggaaugcaucuugcaugggugag

SEQ ID NO: 4202788 - RNA, 94 nt, Human
uucaccucuagccuuuucuguaagaggacuuuaauugacuuaagccaauugguauauucccucucugcagagauauuuuuggcccagagaugaa

SEQ ID NO: 4202789 - RNA, 83 nt, Human
uucaccuugcuuuuuucccacaugcuauuccaccauuaucagaaaaagauuggcauauuuacaaggaagagaggaaaggugga

SEQ ID NO: 4202790 - RNA, 130 nt, Human
uucacgcacuauggaaucccugcuccuuucagagccuccaggcuccugacuuuuugggacuccugguuccaugaggcagggaggcuggcucuucccucugaggacacugggucugggaugcagugcugag

SEQ ID NO: 4202791 - RNA, 58 nt, Human
uucacucuggcuagggcauagagcgcgaacuagguucucagacccgaagccagaggaa

SEQ ID NO: 4202792 - RNA, 58 nt, Human
uucacuggggcccacaucaacauggaaccaggcuaugguuuguaagguccccagagaa

SEQ ID NO: 4202793 - RNA, 77 nt, Human
uucacugugcucagcucuauggacacaaagaugauuuagaagcagcuguugucccugggagcucagccagcagugaa

SEQ ID NO: 4202794 - RNA, 67 nt, Human
uucacuguucuucugggaauggcccugcagccuccuugcgggaggggcugccuagaagaggagagaa

SEQ ID NO: 4202795 - RNA, 87 nt, Human
uucacuguuguauccccagcaucuaguacaacuacugguauauaauaaguacacaguaaauauguauugaaugcauagacuagugaa

SEQ ID NO: 4202796 - RNA, 67 nt, Human
uucacuuccugcucugggcucaauggcagcuccagcugggguccaggagcccaugagagacuuugaa

SEQ ID NO: 4202797 - RNA, 75 nt, Human
uucacuucuguugccuugugcaaugcugaucuccacuuuauugugauugccaaaugcaagguaaaagagcaugaa

SEQ ID NO: 4202798 - RNA, 58 nt, Human
uugauuuuacugcugcugaaaacugucugaagaugagaagcaguuucaguaagaacaa

SEQ ID NO: 4202799 - RNA, 90 nt, Human
uugauuuuguuggagugaggucaaagccuuggguauauaaagcaauuaauaccuuuaggcauuuugcaucaaucacuggagcaucaucaa

SEQ ID NO: 4202800 - RNA, 68 nt, Human
uugauuuuucuuuaaacuuauuaauuagagucagcgucuucucugauuagcaguuuagggaaauuuga

SEQ ID NO: 4202801 - RNA, 70 nt, Human
uugcaaagagauuguuuuaaauaccaauauaccaauugguauaaaaagaauuuagaaggaaauuuugcaa

SEQ ID NO: 4202802 - RNA, 63 nt, Human
uugcaaaguuugcucaaaugagggaagccagcuacuuucacaaugccagcaaccacuuggcag

SEQ ID NO: 4202803 - RNA, 123 nt, Human
uugcaaaucuuucuuauguuaaaugugacucuaaaaugcuaugagaucugaaaaauaaaugcaaaaucagaaagauuucuucuuaagccuuuugggcaauugacuuuagcaucaaagaggcag

SEQ ID NO: 4202804 - RNA, 81 nt, Human
uugcaaauugguuauucuguccuuuuuccaguuggauagcuuuaaaagggaaagcagaaugacuuuccucaggauuuguag

SEQ ID NO: 4202805 - RNA, 84 nt, Human
uugcaacucauuuccccuguauucuuuagauguaaucauuauccugcauucuguauuuggauauaaggggaagacucuaugcaa

SEQ ID NO: 4202806 - RNA, 70 nt, Human
uugcaagauauugauuuccagcugaugcuuuaacugagcccucagcaaaggcaauucauuauucuuuuaa

SEQ ID NO: 4202807 - RNA, 61 nt, Human
uugcaaguuuauggccucccuuuacugaauagccaguggguggagccaguugacucuguga

SEQ ID NO: 4202808 - RNA, 113 nt, Human
uugcaauucuacuguacccuucauuauucaccuacuuuugccauguguguaaggguauaauuuugcauguacguacagagagagugaguguuaaagggauagagggacaguga

SEQ ID NO: 4202809 - RNA, 57 nt, Human
uugcaccuucauauggacuuugguuuucucaguugacugcagucuguugaagggcag

SEQ ID NO: 4202810 - RNA, 82 nt, Human
uugcaccuuggaaaggucagccaauaguccuuguggggacagacaccuacucugaauaugaguuugccuuuccugccugcag

SEQ ID NO: 4202811 - RNA, 71 nt, Human
uugcacucaggguaauucacagauuugucagugacuucauugcagcugugagcuuuacacgaaccuugcaa

SEQ ID NO: 4202812 - RNA, 102 nt, Human
uugcacucuguuacugcuggaagucaugguuagugauauuaauuuauucagugggcugaguucugugacaauaucauuaccagggaguaauuaaggguggga

SEQ ID NO: 4202813 - RNA, 59 nt, Human
uugcacuuuacaggguaacauagaucuuaugauacuagguuacaguuguuaaguugcaa

SEQ ID NO: 4202814 - RNA, 65 nt, Human
uugcacuuugcucaagccauuuguucaggacaagaaguuccugcaccagaaauagcgaaguguaa

SEQ ID NO: 4202815 - RNA, 62 nt, Human
uugcagaaucucaggaaggagaaaguuccaaggagggaacgguuuggugucugaggcugcag

SEQ ID NO: 4202816 - RNA, 76 nt, Human
uugcagauagucucaguagguaggaaccagaaugcccucaguuugaguucuggcccugcugcugugagcacuguga

SEQ ID NO: 4202817 - RNA, 73 nt, Human
uugcagccaaaagcuugauuuccuuuauucauugaaauccucagaagaaagggaauuaacuugaguuuugcaa

SEQ ID NO: 4202818 - RNA, 55 nt, Human
uugcagcccugugcacauccccucucgggagggccagaguacaucagggcugggg

SEQ ID NO: 4202819 - RNA, 65 nt, Human
uugcagcucugauccagggaccaugggaaccacaugagaggcauaugaaccuggguacauugcag

SEQ ID NO: 4202820 - RNA, 62 nt, Human
uugcagcuguuacugauagauacacuuaucucucacugguguauuuaaucagcaacagucaa

SEQ ID NO: 4202821 - RNA, 56 nt, Human
uugcagcuguugcaaagucucuucaacuuccguugcuuugccuccagcagccgcag

SEQ ID NO: 4202822 - RNA, 55 nt, Human
uugcagcuucuugcaucagaaaaucagauagagccucucuggcaagaagcugcag

SEQ ID NO: 4202823 - RNA, 59 nt, Human
uugcaggcuuuagccccauggcugcucucaugggcugggcugguguugagugccuguag

SEQ ID NO: 4202824 - RNA, 57 nt, Human
uugcaggguacauucuuagaauaggauugcugguucaaagaaaaugugcuuuuguaa

SEQ ID NO: 4202825 - RNA, 68 nt, Human
uugcagugaagugugcacaucuuacaaguauagcucagugaagcuucguauauguguacaccauguaa

SEQ ID NO: 4202826 - RNA, 78 nt, Human
uugcagugggaagcugaggggaugcugggcuccucuguagcaaaggugggugcagcagagcuccucuguccccugugg

SEQ ID NO: 4202827 - RNA, 67 nt, Human
uugcaguguuuaacauccuuagaccaggucaucccagaguugagaggauggauuagacaaaagguaa

SEQ ID NO: 4202828 - RNA, 63 nt, Human
uugcaguuuucuggaggggguugcagucaaggacuugcccugccccuccugcuagauaugcaa

SEQ ID NO: 4202829 - RNA, 108 nt, Human
uugcauauuucgaugggguugagaugaaguuuucugcuucuauuguguuuguucucaggacugaauacaaagcagaacucauacugaaggcucuguaggugugugugg

SEQ ID NO: 4202830 - RNA, 76 nt, Human
uugcaucuuagauuaaccauuucuugcuuuagaaucuacuacagagucaaauaagagagagauguugaugaugcaa

SEQ ID NO: 4202831 - RNA, 129 nt, Human
uugcaugaaacucuugagugcaugccuucaugauggggaauguuaagggagggcaauuuauauaacaugugcucuuugaccaaauuauccuguuaaauaggcuugaaaagcgcuuagaaccacugauug

SEQ ID NO: 4202832 - RNA, 79 nt, Human
uugcaugcggauacaauagacaaagugaauggcuccuaaaugaaggacauacgcauuuuaucauugauuguugcugcag

SEQ ID NO: 4202833 - RNA, 56 nt, Human
uugcauguccuacaucugugucugaaacacaguaugcaaucauggaggaugugcaa

SEQ ID NO: 4202834 - RNA, 62 nt, Human
uugcauuuguucagugaaauguuccuuagcacuaaaaaggaauaaaguauugauacaugcaa

SEQ ID NO: 4202835 - RNA, 84 nt, Human
uugccacuagauuucucacaguggaaucucugccucugguaagagguaaaguucuggugagagguaagaggaaaguucugguaa

SEQ ID NO: 4202836 - RNA, 64 nt, Human
uugccagcucuugauggguggguagucacuccuuucagugguugcccccugggggagaagguag

SEQ ID NO: 4202837 - RNA, 60 nt, Human
uugccaggcugaacagggucuuacuacaaggugguaguaagacauuccaugccauggcaa

SEQ ID NO: 4202838 - RNA, 60 nt, Human
uugccagggccagugggggugucagaacuucucaggcaaacuugcuccugcccuuggcaa

SEQ ID NO: 4202839 - RNA, 110 nt, Human
uugccaucaaagcaaaugacagaggcagucaagagcuggggcucuggguuuaagcagauguggguuugaauccugguuccagcauucuucaaccauuugacuuugggcaa

SEQ ID NO: 4202840 - RNA, 130 nt, Human
uugccauuuacuggcucuuucacuugacuuaguugaguuccucaaaaaggagagccccagaaaaugccuugggugcagguugcuuauuugagggugacugcaggaaaugagagugaggguauaaggacag

SEQ ID NO: 4202841 - RNA, 71 nt, Human
uugccccguacuuaucuguagaaugauacuuuagcauugaagucaauuacagcaaugacuguacguggcaa

SEQ ID NO: 4202842 - RNA, 100 nt, Human
uugcccuguacagccagaauggggagaauauugccuuuaagucagggucaucagcaucauggcuuuuuagcauauucaauaaucauucucuguggggcaa

SEQ ID NO: 4202843 - RNA, 84 nt, Human
uugcccuuaugccuaagaaucaguagauauagauuucuaaagugauaaggaggucucuauaaaaaugaucacauaaagaggcag

SEQ ID NO: 4202844 - RNA, 70 nt, Human
uugccguuugggagugaagauucauuuaccaagagagauucuuuuacuaguuuucauuaccaugcugcaa

SEQ ID NO: 4202845 - RNA, 64 nt, Human
uugccuaguucuuuagcuuccguuggacccucuagggggcuagcauggaauaggaaagaggcag

SEQ ID NO: 4202846 - RNA, 62 nt, Human
uugccucaucaaagauguaaaagguguguggguauuuacucgaaaucagcaucuugaggcaa

SEQ ID NO: 4202847 - RNA, 76 nt, Human
uugccuccgccaucugucuuccaaaugauccuguagguacagcuauuauuucagucagacacuggcaggugggcaa

SEQ ID NO: 4202848 - RNA, 73 nt, Human
uugccucucuggaguucucaugaggaacucuguuuuaugccaagagaccuaagcauguacuccaggguuguaa

SEQ ID NO: 4202849 - RNA, 97 nt, Human
uugccucugcuuugccaggggccucugccugcacaucauccugagaccaggaaagagcugccaggcaggcugucccauuguggggggggggagggga

SEQ ID NO: 4202850 - RNA, 63 nt, Human
uugccucuguuccuugugaccaaccuguguauuacccacaugguaauagggagcagaagguag

SEQ ID NO: 4202851 - RNA, 73 nt, Human
uugccugagcugaacuaagcaguuuuauuugcauacauuuagaagaccaaacugcagccuugaguucagguag

SEQ ID NO: 4202852 - RNA, 69 nt, Human
uugccugccagcagaggccagcgcugcaggggcuccuuggccugccuucgcugagcugauuuuaggcag

SEQ ID NO: 4202853 - RNA, 79 nt, Human
uugccugccugugggcugaaagugcucccgauuuuagcauuuguuuugagccacaucugcccacucguccugcaggcaa

SEQ ID NO: 4202854 - RNA, 61 nt, Human
uugccugcgugcacuggguguauuucccguuguuuugauuauacagucagggcacaggcag

SEQ ID NO: 4202855 - RNA, 55 nt, Human
uugccugcuguuuuccuuguauuuguagcaccuacagcaaggacaacauaggugg

SEQ ID NO: 4202856 - RNA, 127 nt, Human
uugccuugauucagaaagauaagagggucagagcuuuacugagugaccuagaauaaguuguuacauuucuccaagcuuauuuacuaauuuagaaaaugacccucugcccuccguucccuacaggcaa

SEQ ID NO: 4202857 - RNA, 57 nt, Human
uugccuugggcuugacaagcugucaaggauucuugccaaggcugccaagcucagcaa

SEQ ID NO: 4202858 - RNA, 92 nt, Human
uugccuuuccugacacagaauuagugaucaaaaucaaaauugugaaccucaccaauuguaguuuuugaugcuauacaucugaguggaagcaa

SEQ ID NO: 4202859 - RNA, 80 nt, Human
uugccuuuggaauaaucagauccuaguccuuuguggaugcaaguccuuuguggacuaggaucuggucauucuaaaggcaa

SEQ ID NO: 4202860 - RNA, 70 nt, Human
uuuuagccugggcuaggcugagggcauuuccauuaccugaaauggaaauccgucauuggccugguuggag

SEQ ID NO: 4202861 - RNA, 75 nt, Human
uuuuagucaugugagguuucuuaucaagaaagcugcaucuguaagagcugauaaggaauuuuucuuuggcuaaaa

SEQ ID NO: 4202862 - RNA, 65 nt, Human
uuuuauacuucuuuggccacaacuuaaucauaugguugcacauagguacaaaggaggauguaaaa

SEQ ID NO: 4202863 - RNA, 82 nt, Human
uuuuauagguggcagucaacucuuuugugcuccuguaucugggacaguuacagagaugccgaagagugaaauaacuguagag

SEQ ID NO: 4202864 - RNA, 57 nt, Human
uuuuauccucauggcugcaagaugacugcuaauauccaggcugcuaugaggaugaaa

SEQ ID NO: 4202865 - RNA, 62 nt, Human
uuuuaugacaggaaaaucacagaauugauguuggauccuuuucaguguaucuugucagggag

SEQ ID NO: 4202866 - RNA, 67 nt, Human
uuuuaugcuaaccucaucuucuccuucuuucucacuuggagagggagaagacaagauuaguauaaaa

SEQ ID NO: 4202867 - RNA, 58 nt, Human
uuuuaugcuacccaacccgucaguggaaacucuugaagaaauggugggguaguuagaa

SEQ ID NO: 4202868 - RNA, 121 nt, Human
uuuuauucauuuuauuuuugcaaucuagaagugguaccagagagaacaacaaaucugcaacuguacucuugcagaaaacaguuuucuugugccuuagugugcuaaaaugaaaaguguaaaa

SEQ ID NO: 4202869 - RNA, 78 nt, Human
uuuuauuucauuuuuuagccaagacucugcacacaauaggugaucaauaaaugcugagugauugaaaggugaaugaaa

SEQ ID NO: 4202870 - RNA, 68 nt, Human
uuuuauuuuacuugggagacuuuuaagcucugagcauaaauuuuccuggucuuccaaauaaggagaaa

SEQ ID NO: 4202871 - RNA, 71 nt, Human
uuuucaaaauggguuucagaaaugguuuaugcaaugcuaacauugguaaaagaauucugaacuuuugagag

SEQ ID NO: 4202872 - RNA, 57 nt, Human
uuuucaagcugugguaacugagagaagacaucucuuuuaaccuaacuagcuuggaaa

SEQ ID NO: 4202873 - RNA, 77 nt, Human
uuuucaauccuuauuugucuaguuccagugcccaugaccuggcucucuggaauggaaacaaacugaggaagagaaaa

SEQ ID NO: 4202874 - RNA, 123 nt, Human
uuuucacaaugaagccaugaaacaucaaauccuggacuacugauacugccagugaagcauauuucagaugguauauacaguagccaccuccaguuuuuugucucagucuucauacccggaaaa

SEQ ID NO: 4202875 - RNA, 79 nt, Human
uuuucacauguauuuggacuauuguagaauauagaaaagaauaucaugcaaacucuaguccuuuaaauaugagugagga

SEQ ID NO: 4202876 - RNA, 64 nt, Human
uuuucacauucucugguuaucgauucauuauauaacauaauauuugggaucugagaagugaaaa

SEQ ID NO: 4202877 - RNA, 58 nt, Human
uuuucaccagguugcugcacuggggccugucuuuuaguaaagcaauuguuggcgagag

SEQ ID NO: 4202878 - RNA, 83 nt, Human
uuuucagaaagcaaauaaaugauucagcaggaaauagguggcauuuauuucuuaugccuagcucuaucauuuggugcugaaaa

SEQ ID NO: 4202879 - RNA, 120 nt, Human
uuuucagagaauauuauggguuuacaaagaaaauuaggcauuuuuuuaucuaauaauguaaauauuaagaagaugguccaucuauuuucuauaaauguauuaauguuccaacacugaaaa

SEQ ID NO: 4202880 - RNA, 57 nt, Human
uuuucagcaaacacugaguucuugucuuguaccaggcucugugcuaauugcugaaaa

SEQ ID NO: 4202881 - RNA, 57 nt, Human
uuuucagcaauuagcacagagccugguacaagacaagaacucaguguuugcugaaaa

SEQ ID NO: 4202882 - RNA, 77 nt, Human
uuuucagcaggacuucccagggaacaucugacauuagcagagaggaaaugcugauuggccugggagucagcugaagg

SEQ ID NO: 4202883 - RNA, 93 nt, Human
uugggucaguugacagggaaaaggguccugguucucaagagcaaggagagagauuugccugggagugaccaagacucuaggucaaggaaacag

SEQ ID NO: 4202884 - RNA, 95 nt, Human
uugggucggccucuuuggcucucaccgauggcucuggagacggccagggucccguugacucuccagcaguccaugugagacacaaagccacccaa

SEQ ID NO: 4202885 - RNA, 63 nt, Human
uugggucuguagggcuguccaaugauaguuaggcuuaaacauuaaacaaccuuacagaacuaa

SEQ ID NO: 4202886 - RNA, 59 nt, Human
uugggucuugcucacuccacacucccaucagguugcugggcuucugagaaagcaccuaa

SEQ ID NO: 4202887 - RNA, 87 nt, Human
uugggugaugccugcugggaccacacuuugaacaacaaguaguucucugcuuguggucuggagaccagcagcuucaguguuaccugg

SEQ ID NO: 4202888 - RNA, 63 nt, Human
uugggugaugugggggagcuaaagauccugagggaugacuuugcugcuguauauggagcccag

SEQ ID NO: 4202889 - RNA, 107 nt, Human
uuggguugguuccaagucuuugcuauugugaauagugccgcaauaaacauaugugugcaugugucuuuauagcagcaugauuuauaguccuuuggguauauacccag

SEQ ID NO: 4202890 - RNA, 64 nt, Human
uuggguuuucccuugaaacugaauagucacaacuucauaaaauguuuuaagggagaaaaccuag

SEQ ID NO: 4202891 - RNA, 77 nt, Human
uugguaauuucaguauuagguacugauacuaaggaaguaagcauuugcuuagauucagcacuuuuucugagaaccaa

SEQ ID NO: 4202892 - RNA, 62 nt, Human
uugguacagaugagguauucucccaagaagggcaagagcaaaccuuaucucuucugugcuga

SEQ ID NO: 4202893 - RNA, 55 nt, Human
uugguagaucucagcucaggauucacgcauaccauguaguccuggagaucaccaa

SEQ ID NO: 4202894 - RNA, 84 nt, Human
uugguagcauugaugugaguuuacauuuggggcucccaagccaaacugucagaaaagaccacauuauucuuuguaauuugccaa

SEQ ID NO: 4202895 - RNA, 57 nt, Human
uugguccaggauggcgugggugucaaggaugacuuccaggcaugagcucuggaugga

SEQ ID NO: 4202896 - RNA, 55 nt, Human
uugguccucaguuucccuaucugugagaggacacuuuggggaugcugaugaccaa

SEQ ID NO: 4202897 - RNA, 84 nt, Human
uuggucuacagcuuugccaaguaaggucuuugaaagguagcuauagacuuuugaaugccuucauuggcgaagugcuuagaccaa

SEQ ID NO: 4202898 - RNA, 56 nt, Human
uuggucugcucugauguuuucuaucugacagagagaaggcugagcagacaggccaa

SEQ ID NO: 4202899 - RNA, 70 nt, Human
uuggucuuauuuaaccuaaauuucuagaucauagauaguguuaauggagaaauagguaagaggaggguag

SEQ ID NO: 4202900 - RNA, 68 nt, Human
uuggugagccucuuagcagcagucuacucuucccagugugauuuaccugucacugaugggcucaccag

SEQ ID NO: 4202901 - RNA, 80 nt, Human
uuggugcaaaaguaauuguggcuuuugcuguaauuauuuucugcaaguaauggcaagaaccacaauuacuuuugcagcaa

SEQ ID NO: 4202902 - RNA, 57 nt, Human
uuggugccaucuuccuuccucugcaccuggaaaggauagggaaggaagaggcuuuga

SEQ ID NO: 4202903 - RNA, 55 nt, Human
uuggugcugauaauggcaggauuuggagccucaguccccauuuugucagcaagaa

SEQ ID NO: 4202904 - RNA, 101 nt, Human
uuggugcuugagccagaugaggcagccuauggggagcucagggccauggugcuggaccugagggccuucuaugcugagcuuuaucauaucaucagcagcaa

SEQ ID NO: 4202905 - RNA, 71 nt, Human
uuggugggggcucggacccaacagcauauuauucuuggaaaagacuugcucuggguccugggccuccucaa

SEQ ID NO: 4202906 - RNA, 65 nt, Human
uuggugguguaggauggcuugguuguaaccaagggaaagaaccaaguuauucugacacucaucaa

SEQ ID NO: 4202907 - RNA, 84 nt, Human
uugguguaagacuccuugaaccauaaaaugaauguuaaagucccaugcaguuuguaucuaugaguacaaggaaucuuccaguaa

SEQ ID NO: 4202908 - RNA, 76 nt, Human
uuggugucucaaagugcugggauuacaggcaugagccaccacacucagccugguuuaagcauuuuauaugacucaa

SEQ ID NO: 4202909 - RNA, 61 nt, Human
uugguguggaggguggccaauucugaugaugaugcggauaauggccaccacuguauaucaa

SEQ ID NO: 4202910 - RNA, 68 nt, Human
uugguguugaagugcugaguauugaugcagaagggauuuugcagcaugcauagacacugcaauagcaa

SEQ ID NO: 4202911 - RNA, 56 nt, Human
uugguguuucuggaaagucuguaaggcagcuaaugcagagcuccccaagacaccaa

SEQ ID NO: 4202912 - RNA, 68 nt, Human
uugguuauguccaggugugagaugaucacugcuucuaaagcuagaaagugccacaacuggacaaccaa

SEQ ID NO: 4202913 - RNA, 70 nt, Human
uugguucccugggguguacaccucacugugcaaacuacugguacaaugagcuguacaucuccaaagccag

SEQ ID NO: 4202914 - RNA, 77 nt, Human
uugguucuuuggaaggaacaggauucucuccugggaaaagagacacagugaggaucugcagccaucuucaggaccaa

SEQ ID NO: 4202915 - RNA, 65 nt, Human
uugguucuuuguggcucagaucugucaccccuuaaugaaguggcuuucuggcugccaaggauuga

SEQ ID NO: 4202916 - RNA, 68 nt, Human
uugguugaauuuagauuagagcagagacgucauuugaucuuagugauguacuugccuuaucuauccaa

SEQ ID NO: 4202917 - RNA, 67 nt, Human
uugguugcuagauugugugcauguguaagauaaauugguuuuacaacagacacauauucuaaaccaa

SEQ ID NO: 4202918 - RNA, 97 nt, Human
uugguuucugguaggguuuuccuuuagugguauuuuagcaaguaauacaauccaguuauuuuuaaaaguauauuaguagaaacucaccagaagucaa

SEQ ID NO: 4202919 - RNA, 82 nt, Human
uugguuugagcuucccucugcgcauugaauuucaggccuacaugacuggaacccaaaugaggagggaaucuugagaaaccaa

SEQ ID NO: 4202920 - RNA, 55 nt, Human
uugguuuucaggggcaggauaaaugcuacaacagccuucagcuuuugaaaaccaa

SEQ ID NO: 4202921 - RNA, 86 nt, Human
uugguuuuuaaaguauuacccucagaacuugaugaagauuuuaauucuugucccucuucacuaacucugugggugaugucuaccaa

SEQ ID NO: 4202922 - RNA, 58 nt, Human
uuguaagaauagucccuagaugugugcaaaacacacucugccuaacuauucuugacag

SEQ ID NO: 4202923 - RNA, 69 nt, Human
uuguaagauucagggaacaugaaagcuaucauacucacauugacuggcugcguuccugugagacugcag

SEQ ID NO: 4202924 - RNA, 79 nt, Human
uuguaagccacugagauuucacugcagcucuuucuaaguaauaagagugaauguaaggaggaaaauuaguggucuagga

SEQ ID NO: 4202925 - RNA, 75 nt, Human
uuguaaggcagagcuaggaagaauuguggcaaccuccuaacaacucuuucuagucucuauucuugcugccuucaa

SEQ ID NO: 4202926 - RNA, 76 nt, Human
uuguaaguauugcaucucuucauaucuguuaugcaccaagcauagcacuaagugcuggagauacaauuguguacaa

SEQ ID NO: 4202927 - RNA, 84 nt, Human
uuguaauuggaaaaaugucaauuuuugauucuauaacugaaaacaaguguuauuuggguuugaguguggcagccuucugugcaa

SEQ ID NO: 4202928 - RNA, 73 nt, Human
uuguaauuucccuuuggguccuggcuggccuagaugcacauucaagugggugggcgacugagagggguuucaa

SEQ ID NO: 4202929 - RNA, 82 nt, Human
uuguacaaaccgucuuuacacaagacaagaauaacauaggaaagaacuauuugucucugaucugugcaaagaaggagagcaa

SEQ ID NO: 4202930 - RNA, 63 nt, Human
uuguacaguuuaagugggugaauuauaugauaugugaaugauagcucacuaaaacuguuacag

SEQ ID NO: 4202931 - RNA, 75 nt, Human
uuguacuacaauguucacaacauuguuaauaauagcuaaaaaugaaaacaguguaagugaucauugauaguagga

SEQ ID NO: 4202932 - RNA, 67 nt, Human
uuguacucaggagacuuaugucacagugauggaaacaaugcugcuacagaaagcuucaaaggugcaa

SEQ ID NO: 4202933 - RNA, 61 nt, Human
uuguagccuuucugucucacuuucugucauuuugugggauuuggggcggaagggaagauaa

SEQ ID NO: 4202934 - RNA, 97 nt, Human
uuguaggauccugcuaguuuaauaacugaguuguuaauuuucuauagaagccauuuaaaauaggaaauggcucaguuacugcaccggauugcuacaa

SEQ ID NO: 4202935 - RNA, 62 nt, Human
uuguauacaggauuacucauagcaacucuuaggagguagagcuaaugugauucugcauacag

SEQ ID NO: 4202936 - RNA, 86 nt, Human
uuguaucagugcugcuuuagcagugcccuguggaauaagacaccuccugcucaauguucccuguacugcuuuuaaggugugaacag

SEQ ID NO: 4202937 - RNA, 100 nt, Human
uuguaucccucuugccucaacucuggaauugguuaccacuacuucugaacuggguggcagcuacagacagaggugaguaugcagaaaagaggaauugcaa

SEQ ID NO: 4202938 - RNA, 60 nt, Human
uuguaugaguaugguguauaggcacuguaugugguguguguaugcaguauguguguauaa

SEQ ID NO: 4202939 - RNA, 90 nt, Human
uuguaugguuaagacugccagcuucuuacggcugccuuguugagaggaagagaggcaggcuggaagcugggaggcaagacauucaugcga

SEQ ID NO: 4202940 - RNA, 93 nt, Human
uuguauguaaagguagcuaaacauaaucuauaugaaaauacaggccacauauuuucuguaauauaauuaauuuagcugccucuguagguacaa

SEQ ID NO: 4202941 - RNA, 57 nt, Human
uuguaugugccagaugcucucucuguugagacaaggaagaguaacuggcacauaggg

SEQ ID NO: 4202942 - RNA, 67 nt, Human
uuguauuagauuuaagacccugaauuugggggcucaagccucauuaaauuucuugauucuuauguga

SEQ ID NO: 4202943 - RNA, 85 nt, Human
uuguauuggguuucugucauuuucauccuaaggagcaccuaugaauucagggcccuuguccuguaaguugacugauacaaugcag

SEQ ID NO: 4202944 - RNA, 58 nt, Human
uuguauuucuccacuuucuguuuaggacuacuaaaugcugaaauauggacgaguacag

SEQ ID NO: 4202945 - RNA, 91 nt, Human
uugucaagagucucaacagugccagcuaccucuaugaggucauggagcggccccgccaugggagguuggcuuggcaugggacacaggacaa

SEQ ID NO: 4202946 - RNA, 79 nt, Human
uugucagaaggaaggcuuccugaugccaaccacuuugaaauguaacaugguuuauaagagccaggagccccuucuacaa

SEQ ID NO: 4202947 - RNA, 59 nt, Human
uugucagcugcagugggggaccacaacuccuugaguucugcccagcugcagcuggacaa

SEQ ID NO: 4202948 - RNA, 66 nt, Human
uugucagucuguggcauuaauaaaagugcaaucaucuugcuuuauuuuaaauaugccaugugagaa

SEQ ID NO: 4202949 - RNA, 64 nt, Human
uugucaucauccucuuugggguaggaaugccacgucagccuuuccucauagaaggauaugacaa

SEQ ID NO: 4202950 - RNA, 86 nt, Human
uugucauuuauggccugaaaaacacacuggaccaauuuaacuaaaaauuguaaauuguggccauuuguguuucuaugaguaugcaa

SEQ ID NO: 4202951 - RNA, 86 nt, Human
uuguccccugccaucuggaugccauugauaugucucagcucagucaugagccuggugauaucagugguuuccaugucaauggauga

SEQ ID NO: 4202952 - RNA, 69 nt, Human
uugucccgugucuuaacagauuguuuaaagaccuacaucgugaaaacagucuugugggcuuggagauaa

SEQ ID NO: 4202953 - RNA, 59 nt, Human
uuguccggugagggggcugcagagugagaugugaccauucugggcuaccuucccggcag

SEQ ID NO: 4202954 - RNA, 101 nt, Human
uuugggaauggggaagcagucucauugaggaaagguaguggcuucucuagucaguucuccauaugaagucauuugucucagugauuucuccauuacccaga

SEQ ID NO: 4202955 - RNA, 72 nt, Human
uuugggagacuuugacgaaagagucauuaaguucauuugcuucauuuguuuuccaagucaaagaaucccaaa

SEQ ID NO: 4202956 - RNA, 61 nt, Human
uuugggaggaaggauuuuugccuucucagucuacugauucaaaugcuaacuucuuuccaaa

SEQ ID NO: 4202957 - RNA, 69 nt, Human
uuugggauccauggagaaggaggugucugugggaucuccaggcucuaucccuccuucuucacucccaga

SEQ ID NO: 4202958 - RNA, 66 nt, Human
uuugggcuagauaacuuauuuucaaggauguuucucaacuuucuuuugaaguuauuuggugcugaa

SEQ ID NO: 4202959 - RNA, 100 nt, Human
uuugggcugcauaggcaggugcauaaggagccucaggaaugcugcuggauucagacucuggucccugugucaccucucacccucauguauaaggcccagg

SEQ ID NO: 4202960 - RNA, 92 nt, Human
uuuggggagggcagcugaaaucacuaacgccagccuggcucuaaccagccugugcaguuuuaaguggucuaaucagcccugcuuuucacaaa

SEQ ID NO: 4202961 - RNA, 79 nt, Human
uuuggggaucugaaguuguggaucuuguugucaugaauuaguuccuauuagugacaaauucauauuucagaggacuaaa

SEQ ID NO: 4202962 - RNA, 72 nt, Human
uuugggggccguuccugggagcugcugguaccaguauacauaauuacuuccgauguuggagcugcuuccaga

SEQ ID NO: 4202963 - RNA, 87 nt, Human
uuuggggguuuuggucugggaggguucacaguuaguuucucauggaaacagaccaguagggcucaucccagugcuggggccgucaga

SEQ ID NO: 4202964 - RNA, 69 nt, Human
uuugggguugcuugucuuuuugagucauagaacuucuuuauguauucugaguacaaguucuuuuccaga

SEQ ID NO: 4202965 - RNA, 93 nt, Human
uuuggguauuuugcaggagugggguugagugauuuauuuuaaaaaagugaguaagaauagaaucauuggaaccacauccaagaaguuuccaga

SEQ ID NO: 4202966 - RNA, 65 nt, Human
uuuggguucugucccagcauagggcacaaaugaugacucaggguaguccagcugguaugcccaga

SEQ ID NO: 4202967 - RNA, 82 nt, Human
uuugguaaaagacagugauaccuugggauguggcagcucuacaaaucuacauugcuaacaccagucaacuguucuuaugaaa

SEQ ID NO: 4202968 - RNA, 71 nt, Human
uuugguaaauguguaugaggaagagagaaacaauuagaaguucucugucacacaaucuacacacuaccagg

SEQ ID NO: 4202969 - RNA, 121 nt, Human
uuugguaccagcucccauaaacccaauugagaaauauaaucuggaaaguuguaaauauaauucuguuucuucuguauuuuuuguuguuguuguagggagcaugguguuccuccuaaccaaa

SEQ ID NO: 4202970 - RNA, 59 nt, Human
uuuggucuugaguggcuuguuaagugguagugacauuucaugaguuggacaagacuggg

SEQ ID NO: 4202971 - RNA, 92 nt, Human
uuugguuguguuuucuuauuguugcuaaaaguccugugauuaaccauauccuguuucuuacaguaaggguaaauaagaacaugcuaaccaaa

SEQ ID NO: 4202972 - RNA, 57 nt, Human
uuugguuuagggucauuuaacacugaaucagcagucuuuccgggauaauaagccaag

SEQ ID NO: 4202973 - RNA, 92 nt, Human
uuuguaaacuuauaauuuuuagguugggcuuacuauuuugaugagaagggugaaucugucaaaggguaagcuggauaacuguauguugcaaa

SEQ ID NO: 4202974 - RNA, 59 nt, Human
uuuguaaccuaaagcaccagauuuccuuucugcauuaccagugugcguuuaggugcaaa

SEQ ID NO: 4202975 - RNA, 59 nt, Human
uuuguaagaacuauaaauugcuuggguucacucucuuccuuguauguaguacuuauaaa

SEQ ID NO: 4202976 - RNA, 74 nt, Human
uuuguaaugcaucuguugaggucugacaaagccagaaaaaaacuguguugucuacuucaauuuguauaugugaa

SEQ ID NO: 4202977 - RNA, 63 nt, Human
uuuguaaugggauaucugaaggauuugccaagcugcaaacagucaggagagcccaucuacaaa

SEQ ID NO: 4202978 - RNA, 129 nt, Human
uuuguaaugucccaccaaacaaguuauaaaauacauauuuaugaauuugucucaggcugaagucucacuagcuguuagagaggauuuuaaaagcauauguguauuguaucguggcuaaacguggguaaa

SEQ ID NO: 4202979 - RNA, 61 nt, Human
uuuguacagaaacugcauuuggagguuggaggaaccuccaacugcuggagucuuugucgag

SEQ ID NO: 4202980 - RNA, 57 nt, Human
uuuguagaggguaauugacagacuuuaagggcccugguucuguugcccuuucacaga

SEQ ID NO: 4202981 - RNA, 86 nt, Human
uuuguagcucccugaugauagugauuuauugaggggaaucaguuuucuacuuaaaggaccauuagucgucucagaaagcuuacaaa

SEQ ID NO: 4202982 - RNA, 60 nt, Human
uuuguaguguugcuaguauaaaaaaagauacaaguucaaaauaugcuggcaacauacaaa

SEQ ID NO: 4202983 - RNA, 67 nt, Human
uuugucaccugggaccauuuagcccacucagcuguggggagcgggugcaggggacccuagggacgga

SEQ ID NO: 4202984 - RNA, 79 nt, Human
uuugucauuaccauugcuugauagcugaaaauuggaaacagugccaguuaauaagaaauggguauauccauaugauaga

SEQ ID NO: 4202985 - RNA, 64 nt, Human
uuuguccuauaauccucuuacauaagagggcaaaguacucguugugauacauuuauggggcaga

SEQ ID NO: 4202986 - RNA, 69 nt, Human
uuuguccucuccauguacaauagcuguggcucaacccacugugaucaauguuuauggaaaagagacaaa

SEQ ID NO: 4202987 - RNA, 82 nt, Human
uuuguccuuuguuacucugggguuguggugaaggagauaacaaacucucuugucacuaguggaaucugggagcaaaggcaaa

SEQ ID NO: 4202988 - RNA, 84 nt, Human
uuuguccuuuuaaaaaaggagcuguuuugccauuugaacagggguuucugcucaaaggaaacacaagcuucuggagagaacaga

SEQ ID NO: 4202989 - RNA, 68 nt, Human
uuugucuaacgucacacagccaggaugaaaaacacagguauucuggcuguguaauauguguagggaga

SEQ ID NO: 4202990 - RNA, 68 nt, Human
uuugucugugcauccuuaacgccugccuaguaugaaugcauggagaggugaauggauggauggaagaa

SEQ ID NO: 4202991 - RNA, 80 nt, Human
uuugucuuaaguugcagaauacauuugggauuacuuugaucacaucacagagaugccauuuguaugcacuuuuaaacagg

SEQ ID NO: 4202992 - RNA, 58 nt, Human
uuugucuuaggucuuuuucucuccuaccccguggaaagaaaugcaguuucaagacaaa

SEQ ID NO: 4202993 - RNA, 58 nt, Human
uuugucuucccccuuuaaucagucauaaguccugucauuauccagugggggagagaga

SEQ ID NO: 4202994 - RNA, 71 nt, Human
uuugucuucucuagaugucuugugcuuuacuacaugcugacuugcauguggaagauacuccagaaauuaaa

SEQ ID NO: 4202995 - RNA, 130 nt, Human
uuugucuuuaaaauucacaggucuccaagagaaguugaaucaagaucuggcauugaucaugagauccuggacauaaugucaaugcaaucauuggacaagucuuuugggauaucuuggggaagaggaugag

SEQ ID NO: 4202996 - RNA, 60 nt, Human
uuugugaacaaacaugaagaugggcacugccccauccaccuuuaugucucgguccacaaa

SEQ ID NO: 4202997 - RNA, 90 nt, Human
uuugugaauacauuuacauguaauguuauacaaagguaugaagacaaaaugccguuugguuguaucauucuaugaauugcuuucaucgaa

SEQ ID NO: 4202998 - RNA, 79 nt, Human
uuugugaauuucagagaugacuuauuggcugcucagaaggaaauucugucucagcaggaagucaucaugaaguuaagga

SEQ ID NO: 4202999 - RNA, 65 nt, Human
uuugugcagauguauauuuguguagaaucuuuauuugugguaaucacagguaacauaugcacaaa

SEQ ID NO: 4203000 - RNA, 83 nt, Human
uuugugccauaugcccaguuauuuccaguguaugcuuuuguagaaugcaaagcugggugugaaugcacaugugguuuuacaaa

SEQ ID NO: 4203001 - RNA, 129 nt, Human
uuugugcucaauaauuauuuacuaauuaguuauuugauagcaguggaucuuuuggccugauuaauccugauauugcuuuaaaccucuacucuguccauguagcuauuagaauguaagaucucccacaaa

SEQ ID NO: 4203002 - RNA, 69 nt, Human
uuuguguauuuauggaaaucacgugagaaguucaggcugucauguguccuaguucauauaauauucaaa

SEQ ID NO: 4203003 - RNA, 63 nt, Human
uuugugucuauuuuuacuggaccaugcugugauauuuaguaugcacuuaaaguggacaucaaa

SEQ ID NO: 4203004 - RNA, 90 nt, Human
uuugugugcugucuguuuacuggcuauagauuugguaauuuacuuuccuuccauauuucuugugguuaguugaauacaacagcauggaag

SEQ ID NO: 4203005 - RNA, 78 nt, Human
uuuguguucagugcauucauggguggcuggauguaugaacagauggaugaaugaaugaagcgcuuauauaaacacaag

SEQ ID NO: 4203006 - RNA, 90 nt, Human
uuuguguucuguaauugcuuuagggcaaauauuucaauguuuaauuuauauuacgaaauugucuuaagaguuugaguauuagaaaacaaa

SEQ ID NO: 4203007 - RNA, 58 nt, Human
uuuguguucuugggggucaucgagguaacaguuauacccuccuuccccccagcacaga

SEQ ID NO: 4203008 - RNA, 86 nt, Human
uuuguuaacagugaacauacuuuugcauuguuccacaaacucuuaagaugguuuugggcaguagauguaucacuuuuagaaacaga

SEQ ID NO: 4203009 - RNA, 61 nt, Human
uuguugucagccuguguuacaaagccuuguguugcaaugugacagaacagguugggagcaa

SEQ ID NO: 4203010 - RNA, 123 nt, Human
uuguuguuaauuaaaccccuauugagcacuaauugcaauuacucuagagaauccucaauauauuuauacuuguguucuacuagagaaaaugugucugaguagcaaaauuauuuaaaauaacag

SEQ ID NO: 4203011 - RNA, 62 nt, Human
uuccuggugguuuaugagaagugagggggaaaagaaauuucuggcucugaugacuagaggaa

SEQ ID NO: 4203012 - RNA, 65 nt, Human
uuccugguuugccuggaauccaggccuuuugauaucugaggcagauguacccaggcaagcaggaa

SEQ ID NO: 4203013 - RNA, 89 nt, Human
uuccuguauuugcuuuguuuugauuugaaaucagucuuugggauuacauuggauaauuuuuucauguuauuaauagugcugugcaggga

SEQ ID NO: 4203014 - RNA, 58 nt, Human
uuccuguccuuuggauugucucaacugugaagagagaaauaucccaaaagacaaggaa

SEQ ID NO: 4203015 - RNA, 60 nt, Human
uuccugugguccagagucauccucaguauucccggugaggacuggcuauuccacaaggaa

SEQ ID NO: 4203016 - RNA, 58 nt, Human
uuccuguguacguguuucgcuggagggaacugucccagaaucaauauuugcauaggaa

SEQ ID NO: 4203017 - RNA, 75 nt, Human
uuccugugugaugggaagaauguuucagcaggaaauaaaaccacagaagaaacacuuuuuuuauccuacagagaa

SEQ ID NO: 4203018 - RNA, 66 nt, Human
uuccugugugcucucauuuaguaggccugcuuuauugacuugguccccacaaaugugucacaggaa

SEQ ID NO: 4203019 - RNA, 57 nt, Human
uuccuguucucacuuucaacuaggggagccaugugauccuggccaaugagauaggaa

SEQ ID NO: 4203020 - RNA, 76 nt, Human
uuccuguuggcuaugaugcccauacacguucuuuuuccagauggaaccaaaagagaaaguggcaggcuuucaggga

SEQ ID NO: 4203021 - RNA, 56 nt, Human
uuccuuagcagaccugguauccuugaauuaagaggaugucaggcacuuaugaggaa

SEQ ID NO: 4203022 - RNA, 58 nt, Human
uuccuuauuccuugauauaaugaguuaucuaauuauggugacaucuguugaggaggaa

SEQ ID NO: 4203023 - RNA, 55 nt, Human
uuccuugagguauucaguuuuaaauguuuacauuuaggcucagauacccagggaa

SEQ ID NO: 4203024 - RNA, 79 nt, Human
uuccuugcaaguucuuaaccgauuuguucugauguugacauaacacagauaaggcaguuaagaguuuaaaaccaaggaa

SEQ ID NO: 4203025 - RNA, 92 nt, Human
uuccuugcuguguauuuguuucagggccuugguaucagaguugcaauuucagucuccgaaccugggucauuguaacaacauccagcagggaa

SEQ ID NO: 4203026 - RNA, 65 nt, Human
uuccuuggccccaugcccagggcucugcuaagggucugaacaugggcauggggcuaaauguggag

SEQ ID NO: 4203027 - RNA, 58 nt, Human
uuccuugggaaaugcucguuuacauuuagugaaugguccugguaguuuugacaaggaa

SEQ ID NO: 4203028 - RNA, 62 nt, Human
uuccuuucauuuuuauaaggcuaauguaacaaggauguugcagaggcaaaaaugaacucgaa

SEQ ID NO: 4203029 - RNA, 59 nt, Human
uuccuuugauuucuugcuggagcucccccuuagccaaacacaagcagaagucagaggga

SEQ ID NO: 4203030 - RNA, 93 nt, Human
uuccuuuuuccuccuguguguugaaaugucagguagagugugaauuagugaugaacugugcugagaggaaagaaugcacagagaaaagagggg

SEQ ID NO: 4203031 - RNA, 95 nt, Human
uuccuuuuuuuccauuaucagucacaguauguccugggcuggguuauguuguaauuuaacuaacucuagcuagaggauuaguggcuaagaaggga

SEQ ID NO: 4203032 - RNA, 113 nt, Human
uucgagguuugugguuauauauuuaaagugcaaucaguuagaccauuuggguaaaggucaacauggaaaaggcugauuucauuauaaaagcaugugagacagagacaagugga

SEQ ID NO: 4203033 - RNA, 77 nt, Human
uucgccacuagggggcagcauugguuuacacagggugaacaaacguucaauucuaaacuaauauucuuuggugggaa

SEQ ID NO: 4203034 - RNA, 99 nt, Human
uucgcgcuucggguugugcaagcuuccuccugccugcuuuggggccuuucugcaauguuccagaagcggcaucaggaggcugcccagccagcucgugag

SEQ ID NO: 4203035 - RNA, 78 nt, Human
uucgcugcuggcccuucucuuccugggagcgcucaucauugcccagcugccagaagaggagggguuagcauuggugga

SEQ ID NO: 4203036 - RNA, 67 nt, Human
uucgcuuuguuaggggcucaggguggauaguuuacuuuuacccucacggaccaccuguacaugugaa

SEQ ID NO: 4203037 - RNA, 107 nt, Human
uucggcuuacaguccucuguugaaguuaccuuucugaaacuucguugcaagcaauauaaugaaguuguaaggagaguggguucuggcauagaaagacuugaguugga

SEQ ID NO: 4203038 - RNA, 73 nt, Human
uucguaaagcagugcaauguguacagaaaaauuucuauaggaaccuuuaugauucacaauguauuuuuaugaa

SEQ ID NO: 4203039 - RNA, 59 nt, Human
uucguguuugaggcagguaagagauguaaaaaacuuuuacaaagcaguuccaacacgaa

SEQ ID NO: 4203040 - RNA, 68 nt, Human
uucguuuauguuccuuccagagagcagaaguguucaauuucugugguaugaaagaaauauggaaagag

SEQ ID NO: 4203041 - RNA, 61 nt, Human
uucuaacagcauuuuuuaaaaaucagggcaugcuuugugcccucaguagaaaauguuagaa

SEQ ID NO: 4203042 - RNA, 70 nt, Human
uucuaagaaagauguugacuccuuugauguaggaugcuucgacucaaauugcuuagcaccuagcuuagaa

SEQ ID NO: 4203043 - RNA, 83 nt, Human
uucuaagcauuguacauauuuguaacucacuuaaccucacaaccuugugaggcagggaguuuaauuguccucauuuugcagaa

SEQ ID NO: 4203044 - RNA, 90 nt, Human
uucuaagccucaguuuccucaccuguaagauggaagagauaguacucauacgcuucuguucaucucaugggagaauggggaggguuagaa

SEQ ID NO: 4203045 - RNA, 101 nt, Human
uucuaaguauaggaacucugcgaccuggaugauaacagcaauauuuuuucuuaaguuuuguuuuguuuuccugggaagaguacgucuauguaaacuuagga

SEQ ID NO: 4203046 - RNA, 89 nt, Human
uucuacaauuagcaucuacuaguaguaucuuugaaacacaaugagauauguuuacucauugauaaaguacugcuuuuguaaagguagga

SEQ ID NO: 4203047 - RNA, 73 nt, Human
uucuacacucaaccugaugaauugaauuuaacaaacaugucaaauauuuuuuaugguuggcccagguguggaa

SEQ ID NO: 4203048 - RNA, 82 nt, Human
uucuacagguaauuugugugguagcuucauugaacagugcuggugcuguucacugaaacuaccacacagaucaccuguagaa

SEQ ID NO: 4203049 - RNA, 55 nt, Human
uucuaccugagcuaggagggaaaaugugccuuuccagcagccaagaaggguagaa

SEQ ID NO: 4203050 - RNA, 65 nt, Human
uucuacucacauuucaucaggccaagaaaaucauguggucaagccugauaucagugugacaggag

SEQ ID NO: 4203051 - RNA, 59 nt, Human
uucuacuuuagcaugcucauucuuuugagaauugaggaauggcuggcccgagguaagaa

SEQ ID NO: 4203052 - RNA, 57 nt, Human
uucuagaacacugaauuuuuggcugccaagaagucagcucagcagauucuucuagaa

SEQ ID NO: 4203053 - RNA, 59 nt, Human
uucuagaagaacuagccaggaaggugggagggugacaugauccaggugguguucuagaa

SEQ ID NO: 4203054 - RNA, 55 nt, Human
uucuagaagcucuaggggagaaucuguuuacuugccuuuuuuuuagcuucuagag

SEQ ID NO: 4203055 - RNA, 65 nt, Human
uucuagaagggccuaggcauaagguaugguuugggaaauugccuuggccaaggaccuuuuuggag

SEQ ID NO: 4203056 - RNA, 84 nt, Human
uucuagcaaauuauugagucugacaguggucuugguaaccucaaacuauaacgagucacacagguuugcaaugauuuguuagag

SEQ ID NO: 4203057 - RNA, 86 nt, Human
uucuagucacuguccacuucauguaguccaucagguuaaugcacuucggaaaugugacuuccuauacugaacuggacugucuagga

SEQ ID NO: 4203058 - RNA, 71 nt, Human
uucuauacaacaguauugugggccagguaaaucaugcuguuuucugcuaucacacugauguugauguagaa

SEQ ID NO: 4203059 - RNA, 78 nt, Human
uucuauccgaaggaaacacugaacuuuguaguguuagcagcagcugaaauuuagaauuauuguuuccuucuaacagaa

SEQ ID NO: 4203060 - RNA, 67 nt, Human
uucuaugaggugaaaaacugugcaugccaucagucaagcuguacagcaaguucaccuugggauagaa

SEQ ID NO: 4203061 - RNA, 88 nt, Human
uucuaugauguggcaguugcuguggcaauaauggggcuggaagcuccauuauugaagcuucaauugucccauuuuuccauguguagaa

SEQ ID NO: 4203062 - RNA, 81 nt, Human
uucuaugcccaguuuauaagaaagaaaaccaaguucaagagcuguagcccaagguuuuaauugucagggcuggaauuagaa

SEQ ID NO: 4203063 - RNA, 65 nt, Human
uucuauggcagugcaggauuuauuuagugauaaugccugguuuuugguccuguacucucauugaa

SEQ ID NO: 4203064 - RNA, 62 nt, Human
uucuauguguucugaauuagguaaauaugacuagaaguccuggagcuucagaauuuguagaa

SEQ ID NO: 4203065 - RNA, 72 nt, Human
uucuauuagauucuacugucacuuaguugguaauuauuucagcccaacaauaagaugauuuagaguugugaa

SEQ ID NO: 4203066 - RNA, 82 nt, Human
uucuauucuucccaccaaaugcacaaggaaauggggaacuugggcuagucucucagaagugcaugugguaaagaggagagaa

SEQ ID NO: 4203067 - RNA, 101 nt, Human
uucuauuguaaggaucaaaugagauaauguaugagcgugaaagcacugugugaucucugaagcacagugaauuacuuuuauuauuauuuuucucaauagga

SEQ ID NO: 4203068 - RNA, 93 nt, Human
uucucaaaauucagagagugaguggacccugcaaggaaggauucaccuuuuuaaacucuuggggucccugcacagaccauuuaauacugagga

SEQ ID NO: 4203069 - RNA, 82 nt, Human
uucucaaaccugcuauaacuggguauuagacuaccuuccaugguguaguguaugauacacucaguuaagcuguaggggagag

SEQ ID NO: 4203070 - RNA, 68 nt, Human
uucucaacaacagugagauauuucagucaaugugcugacugaauagaaaugcucauagguuguaagaa

SEQ ID NO: 4203071 - RNA, 83 nt, Human
uucucacuuuacaguuugggauacugagucuaagagaggcccagugcuucuuuggaugcguuacuuuuacugcuguaggagga

SEQ ID NO: 4203072 - RNA, 80 nt, Human
uucucagacaauagauggaguucauaucaugugccaacccugaucaaaugguaguagcauuccauauacugucuugugaa

SEQ ID NO: 4203073 - RNA, 61 nt, Human
uucucagacuccugagggaaggaugcuacccagcuacagcugguuccucgagaguuuggaa

SEQ ID NO: 4203074 - RNA, 61 nt, Human
uucucagagcucacuguaguaagggaaggacaccugggaaggauuacaggaacucugagga

SEQ ID NO: 4203075 - RNA, 58 nt, Human
uucucagaugauucagauaaacuucaggaucccacacuccuucugaaucaucugggaa

SEQ ID NO: 4203076 - RNA, 74 nt, Human
uucucagccaauacaauuaccaguuaaucacaauagugauugaccucuguugguuggauuauaccaucugagaa

SEQ ID NO: 4203077 - RNA, 86 nt, Human
uucucagcuugagccaaagcacccggcccugggcagcugagcaucagcacagaacccucugaguccuuugggcucucugcugagga

SEQ ID NO: 4203078 - RNA, 64 nt, Human
uucucagcuuuccugcagcuaagggugguagagugacccacuucagauuagagcaacaugagaa

SEQ ID NO: 4203079 - RNA, 82 nt, Human
uucucaggcaguauguccuuccucguuggcagcacuuucugcugaaccugccagugaaaugaagccuaugacuuucugggga

SEQ ID NO: 4203080 - RNA, 57 nt, Human
uucucagggucuugugcaaggggauaccaaagugcccucuuguguagaaccugagaa

SEQ ID NO: 4203081 - RNA, 55 nt, Human
uucucaggguuugugcaggcuugcguauuaguaaaaguuugaaaauucuugagag

SEQ ID NO: 4203082 - RNA, 74 nt, Human
uuuuggcuuuuauuaguggcuagauggggagagggauguaaccugaacccuaaugcagcugagaagggcuaaga

SEQ ID NO: 4203083 - RNA, 77 nt, Human
uuuuggcuuuucuaguuuucucaaaugacuugauugaagacaaucugaguaauucaagacuagagaggcaaacaaga

SEQ ID NO: 4203084 - RNA, 67 nt, Human
uuguuugauuauuguuuuaauaguagagauggggacauuuuaugugucaaagcagugguccaaauga

SEQ ID NO: 4203085 - RNA, 76 nt, Human
uuguuugggaggaaagagaagugguccagaacuagagaaagaacauucugagacugucacuuuuccuuguaggcag

SEQ ID NO: 4203086 - RNA, 82 nt, Human
uuguuugggaggaagauggggaggaagaaaaggaaauaggaaugcuguguuccuucgucuucccuucauuucucccauguaa

SEQ ID NO: 4203087 - RNA, 75 nt, Human
uuguuuguuuuugagauggagucuugcucuguagcucaggcuggagugcaauggcaccaucucagcucacugcaa

SEQ ID NO: 4203088 - RNA, 101 nt, Human
uuguuuuaaguuauauuugaaaggaauuugcaggugugcuguguaagggaaauauuaugcacagcauguuuggagauagaguucaguguggcuuagagcaa

SEQ ID NO: 4203089 - RNA, 63 nt, Human
uuguuuuaauggcuuuagucacuucauuucuuuugaaguuucaugacuugguuauuaauucag

SEQ ID NO: 4203090 - RNA, 108 nt, Human
uuguuuucccuucuguuaaccucuaagcacacugccuugcugugcgcugacuucagaaaacuacagcuagagggcacgugaacgcugagcacagcagguaaagagcaa

SEQ ID NO: 4203091 - RNA, 82 nt, Human
uuguuuucuauauuuuuauuugacagaaaguaguucaaaagcaaaugaacuacuuuguggagauuaaaaauauagugagcaa

SEQ ID NO: 4203092 - RNA, 70 nt, Human
uuguuuugagauggagucuugcucugucgcccaggcuggaguucaguggcaggauuucagcucaguacag

SEQ ID NO: 4203093 - RNA, 78 nt, Human
uuguuuugagcugugcuauuccaaggccgggggaaugcuuaaagaaacccugaucuuggaauggcacagcugagacaa

SEQ ID NO: 4203094 - RNA, 98 nt, Human
uuguuuugcaggagucaugauuuccuuugaguuuuuaugucagcuucuuuaugcguuggcuggauaucagaggaaguguagcccacauugcugaacag

SEQ ID NO: 4203095 - RNA, 55 nt, Human
uuguuuugcaugauucagugguaauguaauaauugcucuugaauaagcauaauaa

SEQ ID NO: 4203096 - RNA, 75 nt, Human
uuguuuuguuucauuauauucaauguuuggcugagcccagugaaacaauuagaauguaaugaagcaucuagauaa

SEQ ID NO: 4203097 - RNA, 84 nt, Human
uuguuuuguuucugaaaauacuucuagguuagaguuuaagcuaaaaaucaauccuagcacugccuggaaggagagacauuacga

SEQ ID NO: 4203098 - RNA, 89 nt, Human
uuuaaaaguucauggaagccagauuucacucuuaauugaguuuaguugagaaacaugagaugugguuucuguuucugugaauugcuaga

SEQ ID NO: 4203099 - RNA, 67 nt, Human
uuuaaaaugugguggaaggauguucuuuuuuaaagacacuccccucucucuuuucacgcauuuugaa

SEQ ID NO: 4203100 - RNA, 100 nt, Human
uuuaaaauuauucaguguugccuucuuaagguuuugacucuuaauuaucguucauuugaaagacaagacuauguagaaaguauucuguuguucuuuugaa

SEQ ID NO: 4203101 - RNA, 62 nt, Human
uuuaaacugggauucuucacaaggugaugguagcauuaccagagggcaaaccccagugugaa

SEQ ID NO: 4203102 - RNA, 91 nt, Human
uuuaaagaaguuugacaaaguaaaaugacaauauccagauaagacaugggcauucuaaagugucuuuuaguuugugagaucugacuuuaaa

SEQ ID NO: 4203103 - RNA, 77 nt, Human
uuuaaagaucaguuucuaccauguggaaugcaugauaagguauauugaauugcacguucuuggaaauuaucucuaaa

SEQ ID NO: 4203104 - RNA, 62 nt, Human
uuuaaaguaaucugugugaauuuaucuuuggaaaauggugaacauucauugguugcuuuaga

SEQ ID NO: 4203105 - RNA, 62 nt, Human
uuuaaauagcucugguccucacccaccagccccugggucugugguggaccagugcugggaga

SEQ ID NO: 4203106 - RNA, 63 nt, Human
uuuaaauaguaggucuauuuuggccaaugauugaguuccaccauuguagcucugcuguuugaa

SEQ ID NO: 4203107 - RNA, 107 nt, Human
uuuaaaucugcauguggggacuacuuuaucucaguguacaggaugauaaaauggaaauuggugucacauucugaugugaggugagaaaccauaauguggaauuugaa

SEQ ID NO: 4203108 - RNA, 78 nt, Human
uuuaaaucuuugcuauguauuauugauaggaauugugucauuaggccauuccuaacuaauuuguagcaaaauaaugaa

SEQ ID NO: 4203109 - RNA, 76 nt, Human
uuuaaaugucuauuucuuuguuggacugaaaagaagugcauuguucucagcugaaguggagaagcagacagaugaa

SEQ ID NO: 4203110 - RNA, 77 nt, Human
uuuaaauuaguagaguaaaagaggugagauguaauugauaaaaacuaugucuauguucuuuacuguguuauuuugaa

SEQ ID NO: 4203111 - RNA, 112 nt, Human
uuuaaauuuacuaugaucuuugagacagcuuuaucuucaccugggaauugcuguuagacaauuaagguuaguaaagcucauugaauuucucagagggaagguguuauuugaa

SEQ ID NO: 4203112 - RNA, 55 nt, Human
uuuaaccaguuuacaaagaauuggucuuccacaauccaaaugggagcugguuaag

SEQ ID NO: 4203113 - RNA, 84 nt, Human
uuuaacucuauauugcugguggcucugauuucaugaugcauugugcuuaugaaacucuagcuuucagcacuaaaaugaguuaaa

SEQ ID NO: 4203114 - RNA, 74 nt, Human
uuuaacucuuugacaauucaugacauuuauaggccaacuccugagggccguauuggucagaaugucaaguugaa

SEQ ID NO: 4203115 - RNA, 83 nt, Human
uuuaacuuuugcaagcgaagcauaaugaugauugagauugaaagaucaaaucauugcauuaauguuugaacugugauauuaaa

SEQ ID NO: 4203116 - RNA, 60 nt, Human
uuuaagcacagggauaaaguuacccuucaggugguaaagucagagauccuuggcuuuaaa

SEQ ID NO: 4203117 - RNA, 128 nt, Human
uuuaagggauggaaaauaaugagugugaauguuagacuuuauuucaaaagagcuugggguuguuagaaaaucaccaaggcuuuaggaauuucuaccuuucagcuagaaucauugugauaaaugguaaa

SEQ ID NO: 4203118 - RNA, 63 nt, Human
uuuaagguugaaauagaugcgucagagauuuuuuuaagagcaucucugaaacugugccuugaa

SEQ ID NO: 4203119 - RNA, 91 nt, Human
uuuaaguaaagaaacaucugcccaaaaagcuuagguaacaagccuccaucaucauguggcuuuggcuuggcuuuugaucucuuuucucaaa

SEQ ID NO: 4203120 - RNA, 82 nt, Human
uuuaaguaagccuuaucucuaugaaucuccuggggcacuugaggcugcucacagugacuuacagagauugggcuucaaugaa

SEQ ID NO: 4203121 - RNA, 62 nt, Human
uuuaauagagaaugagacugagguaugagaaacaguuugguauuucagcauucucaguuaaa

SEQ ID NO: 4203122 - RNA, 70 nt, Human
uuuaaucaguuuuucaaaacaaacccuguuagaauugaauagcguggcaaauuuuggcaagcugaauaga

SEQ ID NO: 4203123 - RNA, 127 nt, Human
uuuaauguuuacuaugccucaagcguuuccuuugaugucaguaucauuccucucauuuuacaacugaggaaauacugggcucaaaaggguuaaaucacuuguccaaggucacauagaugucaauaga

SEQ ID NO: 4203124 - RNA, 70 nt, Human
uuuaauuauuucaggaacauuuaaccacagggccagcaggcuggauccugauauguguuucucaguugga

SEQ ID NO: 4203125 - RNA, 74 nt, Human
uuuaauucacuauuuuucacuuaggcuuauuagccuugcuuuuuuuaaguguaggggagaauacaugaauuaaa

SEQ ID NO: 4203126 - RNA, 95 nt, Human
uuuaauucucucucucagugucucuuucuauaaucuaccaugccagguguuugaugucuuggggaagguaagagggagugagggaggaaauugaa

SEQ ID NO: 4203127 - RNA, 82 nt, Human
uuuaauuguuaaugccauuaggaaauuuauuacuacugguggaaaugaucuccauaaauuacuuaagguuugacuaauugaa

SEQ ID NO: 4203128 - RNA, 72 nt, Human
uuuaauuuuauaccucuuuaaagacccuguauccaaauauacaagucacauucugagguauugggaguuaga

SEQ ID NO: 4203129 - RNA, 64 nt, Human
uuuacaagaaaucaugaugcuaaagcuugacacuaaagcuugaguauuguuaucucugaguaag

SEQ ID NO: 4203130 - RNA, 61 nt, Human
uuuacacggcauuaucuucaugucaagaaagacgucuuugagaugacaugccuguuguagg

SEQ ID NO: 4203131 - RNA, 74 nt, Human
uuuacagagauaauuaguuuaagaugagguuauuagaauggguccucauccaguaugacuggugucuuuauaaa

SEQ ID NO: 4203132 - RNA, 68 nt, Human
uuuacagagccuggccagcccugaccugccccucccauccuggggcugcaggguccaggcccugugga

SEQ ID NO: 4203133 - RNA, 59 nt, Human
uuuacagcacugaagccaggggaauuacguggucccuccccugguguuuggaguuugag

SEQ ID NO: 4203134 - RNA, 58 nt, Human
uuuacagucucuauagucaaaagugaucaauuccacuuuauucuguugguccuguaga

SEQ ID NO: 4203135 - RNA, 58 nt, Human
uuuacaguuccaugugauaggcacggugggcuggggccggaucaggggagucugugga

SEQ ID NO: 4203136 - RNA, 59 nt, Human
uuuacaugaguagcagauguucugaaggugaaagucauguacucugucuauucagugaa

SEQ ID NO: 4203137 - RNA, 81 nt, Human
uuuacaugugagaaggagguagcucaggugaacagagggaugacuuugaguucuguguauccuuugucccacacuugugaa

SEQ ID NO: 4203138 - RNA, 59 nt, Human
uuuacauuuccugucagagauauaacaaaaugcucucuuguuguaauaggaaguguagg

SEQ ID NO: 4203139 - RNA, 61 nt, Human
uucucaguaguuagcauuugugaauuggccuccuuugauuucugaugaggcugucugagaa

SEQ ID NO: 4203140 - RNA, 56 nt, Human
uucucauaugcacucuauuugacaaucauuauguuagacuggaagucauuugggag

SEQ ID NO: 4203141 - RNA, 62 nt, Human
uucucaucuaaggagggaggugucuccaagaaaccaagccauucccuccugcagauagagaa

SEQ ID NO: 4203142 - RNA, 57 nt, Human
uucucaugaugcaauucauccccagccacuuaucuggccaugaaauaucaaugagag

SEQ ID NO: 4203143 - RNA, 68 nt, Human
uucucauguaaaugccaucauccugaucuuucuuucaggaucacuaguaauauggcauuuaucuggaa

SEQ ID NO: 4203144 - RNA, 55 nt, Human
uucucauucagucuuccuuaauuucacugugaaugauaaaggaagaggaagggaa

SEQ ID NO: 4203145 - RNA, 56 nt, Human
uucuccauaucugugcugauucaccucacacuagaucagugcaauucuauggggaa

SEQ ID NO: 4203146 - RNA, 62 nt, Human
uucucccugugccucugaagggcggacggcguugugucugcgcaguccugcaggcgggagaa

SEQ ID NO: 4203147 - RNA, 74 nt, Human
uucuccuauuuuauaguccuaguaguuaugaaucuugaaaaguuaagccugagugcuuaggacuguuuagagaa

SEQ ID NO: 4203148 - RNA, 130 nt, Human
uucuccuuaacuugucgaauucuaaugcuaauuuccuguauuucugguuaaaugugcuaagcagucuuagcucuaucacuuguguaucagagaugagagguggaggaguuuuuucgauaucuaaauggaa

SEQ ID NO: 4203149 - RNA, 98 nt, Human
uucucguauuuuuucuaccuuuugcuuauuaugacacucuauuauccaaguugcccaaguguguccaguaauauaaaaggaguuguugaaauucagaa

SEQ ID NO: 4203150 - RNA, 77 nt, Human
uucucguuuaugugaugcaucccagaaaaaugacaugaccauaacauuuuugagaauuguaucauauaagaugggga

SEQ ID NO: 4203151 - RNA, 65 nt, Human
uucucuaccuuuuacuagugccaugauugugggcaaaucaccucaugucaucaguaaaaugagga

SEQ ID NO: 4203152 - RNA, 62 nt, Human
uucucuacuaacugucacuucugcacaucuguugcccaaauaugauuggcgguuguagugaa

SEQ ID NO: 4203153 - RNA, 61 nt, Human
uucucuaggaguucugggaucauuccucacccagugagggcuuuccuaagauuugugagaa

SEQ ID NO: 4203154 - RNA, 74 nt, Human
uucucucaaacccuuuucagaguugauaucauucccacaugggaugaggagucgagaagggguaauuuagagaa

SEQ ID NO: 4203155 - RNA, 129 nt, Human
uucucucaucuugcucugcuuuuucuguuuucuuuguuuguuuguuuuccaggaagauugcaagaugccuggucuuuuucuggaagaguaaaauaagcccugagaagaggggcagguauaggagaucaa

SEQ ID NO: 4203156 - RNA, 59 nt, Human
uucucuccuccuagaggcuuuugugauuucugucaccuuuguguccugggaggagagag

SEQ ID NO: 4203157 - RNA, 70 nt, Human
uucucuccuuuaucugcucagaaaguacaggguguucuguuucuccugugcauacagaucaaggagcgga

SEQ ID NO: 4203158 - RNA, 55 nt, Human
uuucuguuucuggggucucugacagugacugguccugucuucccagcagcaggaa

SEQ ID NO: 4203159 - RNA, 116 nt, Human
uuucuguuuugcucucucacagccccacugucugcaggccucagcauguguaaccccauucugcgucugcuccugggcuuggcuggcuggucuggggugagaggacagagcagggg

SEQ ID NO: 4203160 - RNA, 71 nt, Human
uuucuuaaaagucauugaaaaauguauagcuagaguuaugucucuaugugcaaauuaauugcuagaagaaa

SEQ ID NO: 4203161 - RNA, 65 nt, Human
uuucuuaauuucugucugacaucccugccucucuggggagguagagguaggaaagaauauagaaa

SEQ ID NO: 4203162 - RNA, 77 nt, Human
uuucuuacuugcuacgugugugacauugggaacgugauuuaccacccaauauguugucauaugugaaaaguaggaga

SEQ ID NO: 4203163 - RNA, 81 nt, Human
uuucuuagcauuuuagugguguaggucuggaaggauccuucaaggggcaucuaauccaguccagcaucgugcuuauagaga

SEQ ID NO: 4203164 - RNA, 76 nt, Human
uuucuuaguaggugugcauguggaagcauguaugugagucuucuauauucugcuuuugaugcauucauacuggaaa

SEQ ID NO: 4203165 - RNA, 73 nt, Human
uuucuucacaaauuucagcucccugaaaguuagguaaauaucuggaguuugagcugcaguuugcuugaggggg

SEQ ID NO: 4203166 - RNA, 87 nt, Human
uuucuuccccaguggacuuuaaaaugcuagaacaggggccauuuugcacccuguucuagucuuuacagugaaagggacaaauagaaa

SEQ ID NO: 4203167 - RNA, 57 nt, Human
uuucuucugucuccugcauguggaguuaaaaguguuaccugucuggagacaaagaga

SEQ ID NO: 4203168 - RNA, 75 nt, Human
uuucuugaagcugggggagcauuauuuauguagauugaaacaaaugcugaaugugcucccuuuuaaaaugagaaa

SEQ ID NO: 4203169 - RNA, 72 nt, Human
uuucuugccuguucauuuugaaguggaggaauuuucauuuucaaguuugaacaggaaauucuacucaggaaa

SEQ ID NO: 4203170 - RNA, 70 nt, Human
uuucuugcuauagcaagcuuugagcuuucagagaacuuauauuugaaaacuggaucuucuauggcagaga

SEQ ID NO: 4203171 - RNA, 64 nt, Human
uuucuuggggcuccugcgccauucucccaggaaagugaggcgaaggugcuggcgccccaggaga

SEQ ID NO: 4203172 - RNA, 73 nt, Human
uuucuuguaagguagacuuccaacaaauguuggaugucuaacaaauguuggauuugucuuccaauaaaagaaa

SEQ ID NO: 4203173 - RNA, 61 nt, Human
uuucuugucuuuaguaucuggcuucucaacuuuuucaccugccaucuugcaagaugagaaa

SEQ ID NO: 4203174 - RNA, 69 nt, Human
uuucuuuacugaauuugguauauuccauuugcaaugauuuaacaaggggaauaggaccuucaggagaag

SEQ ID NO: 4203175 - RNA, 62 nt, Human
uuucuuuauccuccuuugcacauggccaaacucaggcucagcaacacagaaggcuaaaggaa

SEQ ID NO: 4203176 - RNA, 71 nt, Human
uuucuuuccccaugaacauugcagggaugugacucggugucacuuaggugaugugcaugacaugagggaaa

SEQ ID NO: 4203177 - RNA, 60 nt, Human
uuucuuucuuuuuccuggccaugaggacaaaaauuacugaguggcccuuaaagagggaag

SEQ ID NO: 4203178 - RNA, 79 nt, Human
uuucuuugcuguuugugaaaugaagaaagaucaagucagugaaaaacaggcuuucuggaaguuggaaauagcagagaaa

SEQ ID NO: 4203179 - RNA, 58 nt, Human
uuucuuuggcacagucucauuugauguucacaucagcucuggcugaguuagucagaaa

SEQ ID NO: 4203180 - RNA, 108 nt, Human
uuucuuuuacuuugccauagcuuaaaagcucuugcucuaguggccccugaaugcaaaacaagcauugccuggccacaggcaugcuuggccauggcugguaaugagaaa

SEQ ID NO: 4203181 - RNA, 66 nt, Human
uuucuuuucucauggacccuucaugauguauccuuuuuccaucugccaaugccaugagaagagaaa

SEQ ID NO: 4203182 - RNA, 120 nt, Human
uuucuuuucugguagggagauacaaaaagggagaugagguagauuuaauaauaaaaguacugaaggucucugacucagccucuuuuccuauuccuaaacaugccaaaauaaaugaggaaa

SEQ ID NO: 4203183 - RNA, 71 nt, Human
uuucuuuugcucuugcuuuuucuagaaagaugacaacauccuggcuguuagagaggcaaggaaaggagaga

SEQ ID NO: 4203184 - RNA, 129 nt, Human
uuucuuuuuuguuguugcuguuucuaaagaguaaaugccuuuuuaguucuuggaucaugcagacucugcuguauugcacaugcgcuagaaccaggcacuguuuaguaauggagugacaguuauuuauua

SEQ ID NO: 4203185 - RNA, 130 nt, Human
uuugaaacuuuuugcuaaaauucucuugugcugacuuguaaaauauccaguuaaggugguacuguaaauucacguuuugccuucugccuuacuguauauacagaauagccaaagaauaacguauaacaaa

SEQ ID NO: 4203186 - RNA, 87 nt, Human
uuugaaagccuucagaguuuuaucauacguggauaaaacucauaaugcaaauuauccauguaugauacaacucagaaggcucucaga

SEQ ID NO: 4203187 - RNA, 59 nt, Human
uuugaacagacacuuucuacaguacuuaugagucaaggcuguucacugugcugugcaaa

SEQ ID NO: 4203188 - RNA, 97 nt, Human
uuugaagaccaaguucugaacauggcccgcgauuuggcaaauacuuagucauugaaugcugaagagcagggacaucuucagaucacuucucuccaaa

SEQ ID NO: 4203189 - RNA, 88 nt, Human
uuugaagcaaugcauucaugaagauugcacauucuggcauacuuaguaauuucacaguaauaaugagucauuccugaaugcuuucaaa

SEQ ID NO: 4203190 - RNA, 64 nt, Human
uuugaaguguaugaaaauacagguugucuggggacguuguucugauauuuucauauaggacaaa

SEQ ID NO: 4203191 - RNA, 62 nt, Human
uuugaauguacaugugaauuuaggcaauggaaaacacauuuugccugcacuguauauauaaa

SEQ ID NO: 4203192 - RNA, 88 nt, Human
uuugaauugucccuuauuauuucaccuagcugccucuagcaccuugcuugggcagguaggugaaauaaugagggccccucuuuucaaa

SEQ ID NO: 4203193 - RNA, 64 nt, Human
uuugaauugucuguggguugcaaggcugccaauuuucagaaguuugcaccaugauaaauucaga

SEQ ID NO: 4203194 - RNA, 78 nt, Human
uuugacacagcagacuggaguaggcagugcuguuuuucccuagcccuggcauucugcuugagucucaacuguuacaaa

SEQ ID NO: 4203195 - RNA, 64 nt, Human
uuugacaggacuaacauauggcuuuggauuucuggccaaagacuccuccaugguuccuaucaga

SEQ ID NO: 4203196 - RNA, 105 nt, Human
uuugacuucuguggucagaaucuuucccucuuuuaugagcaugagauacuuccugcuaacuuauguaaaacggaaagggaauugaugucauaccacaguguugaa

SEQ ID NO: 4203197 - RNA, 60 nt, Human
uuugacuuucugaaucucugcacagucagaaaucuggcagaauaaucacugaaguucaaa

SEQ ID NO: 4203198 - RNA, 82 nt, Human
uuugacuuuugaugugugaauucuuaaaugugcacaaaccaaagacaauggcauauauacuuugacacauucugaaguuaaa

SEQ ID NO: 4203199 - RNA, 66 nt, Human
uuugagaaaugcugcucuugguuaauuucuugaagagaagcugacagaugcagcagguguuuugga

SEQ ID NO: 4203200 - RNA, 63 nt, Human
uuugagcaaaaacaguuuaaauucuucuuagaaggauucacagacagcugcuuuuggcuuaaa

SEQ ID NO: 4203201 - RNA, 60 nt, Human
uuugaggaacaucugcuagauaugucauuccaguggcauuuuacaggucaguuccuugaa

SEQ ID NO: 4203202 - RNA, 63 nt, Human
uuugaggaggacagaaacauuuaauuguugaguaauacuucuuaaaugauguuuuaccucaag

SEQ ID NO: 4203203 - RNA, 88 nt, Human
uuugaggguuaauugucaugucuauuguaccccaggcaagcaccauccugcugaguacaaaguggaccugauaguaaagccccucaga

SEQ ID NO: 4203204 - RNA, 78 nt, Human
uuugagguuaguuuauaauucauuucugucuguugugccuaaaaucuuggcuauucagaaugaugacggcuccucaga

SEQ ID NO: 4203205 - RNA, 82 nt, Human
uuugaguaagcacuugugugucuucuucacugcccuagucucugugccuagagcagugucuggcacauacuagaugcucaga

SEQ ID NO: 4203206 - RNA, 62 nt, Human
uuugagucugcuuccauuuucacuucuuggcacugccugugugagugggaaggggacucgga

SEQ ID NO: 4203207 - RNA, 71 nt, Human
uuugauaauggccgcuaugagucaccugcagaguagaacuguguguauccauuagaggccaagacuucaaa

SEQ ID NO: 4203208 - RNA, 88 nt, Human
uuugaucagcauggcuagucuuacagugcauucuuugaaaaagaagaaauacugccuaagacuguaacacaacaauuugcuaaugaga

SEQ ID NO: 4203209 - RNA, 55 nt, Human
uuugaucuaugcgugguuucccaguuugagauggaggaucaugacaagggacaaa

SEQ ID NO: 4203210 - RNA, 69 nt, Human
uuugaucugcacacaccgugcuucacugauggaaucaccauguggccugggaaaugaguguugaucaaa

SEQ ID NO: 4203211 - RNA, 93 nt, Human
uuugaugggccuaaauucaguuauauguccacuuccaaaccauuugcuguggccaagggaagagggcaugauaauuagcuugagccaaucaag

SEQ ID NO: 4203212 - RNA, 76 nt, Human
uuugauggucuuaagaagcaguuaacaugacuugaaagcaacauuuuucaaguacuguaaacaugcuaccauggaa

SEQ ID NO: 4203213 - RNA, 85 nt, Human
uuugaugucacauauguucuccaugggugggauuagcugugcuaagccucacugucaccagcccugauuagagaaugucaucaaa

SEQ ID NO: 4203214 - RNA, 55 nt, Human
uuugauguuacaaggugccuaaacuguuaucagugcugggaaaguaacauacaaa

SEQ ID NO: 4203215 - RNA, 98 nt, Human
uuugauuaaucuucuuggauuuuggaagcaguguacacuguacuugaaccaguuuaucaggugaccagaaaggcuuccauuuucaagugggauucaga

SEQ ID NO: 4203216 - RNA, 100 nt, Human
uuugauuaugcaacauucuuggugaaaagcugguugucauucagaauugauuucuguauaguuuugaauuuauaaccaugaagaauagcagcugauuaaa

SEQ ID NO: 4203217 - RNA, 61 nt, Human
uuugauuugcaguuuugguuucauaucuuuuuagaggugauacccuuuggcugcgagcaaa

SEQ ID NO: 4203218 - RNA, 67 nt, Human
uuugauuugcuuguucaccaguacuuuuggagcagaaugucaggaguaugugaggaaguaaagaaga

SEQ ID NO: 4203219 - RNA, 67 nt, Human
uuugcaaaagcugcugccaaucaggcuugccuaucuuugcagggcuaauuaacagcacuugggcaag

SEQ ID NO: 4203220 - RNA, 65 nt, Human
uuugcaaacagcuaccuucucacugugcccuaacaugggaaccaggaaauggagcuguuaucaag

SEQ ID NO: 4203221 - RNA, 118 nt, Human
uuugcagguaggcaguaaacuauaauagcuaugguggaagaggcucaggaauuaauugaguaguuucaaauccugauucugccacuacuagccuuugaaaugcuuugccacuugugaa

SEQ ID NO: 4203222 - RNA, 89 nt, Human
uuugcaguuuuuagucuagauuaaauuaauugguggugguuuucauuuaaucacacuaaucuuuuauuugguuucuauaaugucgcaaa

SEQ ID NO: 4203223 - RNA, 56 nt, Human
uuugcaucauucagugccuugggaaugucuuacgggauauuucuggaaugggcaaa

SEQ ID NO: 4203224 - RNA, 80 nt, Human
uuugcaugcuugugauguccugucuacauaacugugugaauuagaaaagucuacacaucccugaggacagaagaugcaaa

SEQ ID NO: 4203225 - RNA, 61 nt, Human
uuugcauuccugccugcauucaguagauaaacaaagaaagagcaggucccuggcaugcaga

SEQ ID NO: 4203226 - RNA, 84 nt, Human
uuuggaccgggcaagguggaucaugccuguaauccuagcacuuugagaggccgaggcaggcagaucaccugucaggaguucaag

SEQ ID NO: 4203227 - RNA, 55 nt, Human
uuuggagaggagaagucgaaguuagaaugccuccauguugcuucuuuucucuagg

SEQ ID NO: 4203228 - RNA, 74 nt, Human
uuuggagauuaauauugaaagcugugcuuaaucuggauaucaucaagaaucugaugcagcuucucaucuucaaa

SEQ ID NO: 4203229 - RNA, 63 nt, Human
uuuggagggucagagcaagacuggggucaaugauggccccaggccuuuggucuggcaacuaga

SEQ ID NO: 4203230 - RNA, 55 nt, Human
uuuggaggugugcaaaauauuucauaaugaaauagcauuuuuguucaucuucaaa

SEQ ID NO: 4203231 - RNA, 61 nt, Human
uuuggaucacacaugcacuguuugagacaaauuucaagcugcaucagugcagugagacaga

SEQ ID NO: 4203232 - RNA, 78 nt, Human
uuuggauccucuucagaucuggugaaguuauaguauaaaaaagcauacuggcuagcguaucugaacaauggguucaag

SEQ ID NO: 4203233 - RNA, 83 nt, Human
uuuggaugacucuugcacuguucuuuccaaauuccccaggugugaaaauuugagggauuuuaaaugaacaaguaucagccaaa

SEQ ID NO: 4203234 - RNA, 76 nt, Human
uuuggcagagaguaugcugaagaucaugauaucaacauaaaaaguuguucuuuuucauuuuuaguuuucuuccaaa

SEQ ID NO: 4203235 - RNA, 56 nt, Human
uuuggcagcuuccauauucacuuguuuuucuccccagugaaauggcaguugcuaaa

SEQ ID NO: 4203236 - RNA, 80 nt, Human
uuuggccaauaucucuggcuuggugccuuacuuauuacagaauuguuauucugcaggaucagagccagaggcaggccaaa

SEQ ID NO: 4203237 - RNA, 66 nt, Human
uuuggccagggaggaaugucccuuuguucuucuucccccugagaagccauuccuuugucugccaaa

SEQ ID NO: 4203238 - RNA, 60 nt, Human
uuuggccuuggucacaguucccaacauugaauaacaacucaauguauaugugaccccaaa

SEQ ID NO: 4203239 - RNA, 59 nt, Human
uuuggcggggcaauucugaagcagcuuccacgugccuucucagaagcuccccagcuaaa

SEQ ID NO: 4203240 - RNA, 107 nt, Human
uuuggcuaagaacuuugggacuuuuuguuggcuuaagaaauacaguuauuaugcuaguuaacuuuauuuuaaagacaguuuugcaaaauucaguucuauggcacaga

SEQ ID NO: 4203241 - RNA, 88 nt, Human
uuuggcucagaucuuauuauuguuguaaaagcaaggccgaagcaugaaagccuuguauuugaaacagugcauggguuuuguuaccaaa

SEQ ID NO: 4203242 - RNA, 55 nt, Human
uuuggcucauugcucuugccugugaauuaccuucugaggcaaccaaugaggcaaa

SEQ ID NO: 4203243 - RNA, 91 nt, Human
uuuggcugcuuuuuccccacuucgcucauguauuuuccagccugaaacagacuucuugggaaagaaugagaaggugagguauggcuuuaga

SEQ ID NO: 4203244 - RNA, 69 nt, Human
uuuggcuucaggauggagggaagcacagaaauuucaagauuucugacugcuugauccuccugugugaaa

SEQ ID NO: 4203245 - RNA, 81 nt, Human
uuugggaagacuuauuauugugaccugagaauguaauuugaauaugugggacagggacagugauauuucuauagucccaga

SEQ ID NO: 4203246 - RNA, 94 nt, Human
uuugggacucauuuacacaaaguuagcucuugcagcugcaggcuaugugacugccuagcaagagugggcuuugugggaauuggagugucccaga

SEQ ID NO: 4203247 - RNA, 70 nt, Human
uuugggaggcaguuugugaaggagcccaaaacugugaggcuuccugcugggcucugucaugccuuccaag

SEQ ID NO: 4203248 - RNA, 92 nt, Human
uuugggaggcugaggcagguggaucacgaggucaggagaucgagacuauccuggcuaacacggugacaccccgccucuacuaaaaauccaaa

SEQ ID NO: 4203249 - RNA, 68 nt, Human
uuugggcauauagcuguucccuucucugguuggaaacucgucagucagguacagcguaucugcccggg

SEQ ID NO: 4203250 - RNA, 103 nt, Human
uuugggccaguuucuuacauucuuugggccacuuuaguuuccuuauugaaaaauggggauaauaauaguggcuacaucucagugugauucugaggaaaccaga

SEQ ID NO: 4203251 - RNA, 62 nt, Human
uuugggcuggagaugaucugcuguaguugucacucucagucuuugaugcauccuagccugag

SEQ ID NO: 4203252 - RNA, 127 nt, Human
uuuggggcagguaagauccagaccauguacaaaagcaucucucacucucugaauggauauauuucuaauuugagauaguaagaguuuggauagugagagauacuuauaucuggaaaaaccucccaaa

SEQ ID NO: 4203253 - RNA, 79 nt, Human
uuuggggcugccaccagcucuccacccuccugguuccgcuggccgggccaagagaggauggagggaugggagucccagg

SEQ ID NO: 4203254 - RNA, 114 nt, Human
uuugggggaaacagaggaggcaauggcucaccccugucagagaggaucaacaacaugcagacauuccuuauuaugagagauggguaacuggagucugcuuacccuacuuccaaa

SEQ ID NO: 4203255 - RNA, 94 nt, Human
uuuggggugacgcaccaaaccuugaaccaaucacuguagccagagagacaggugcucugguuugaccugguuuaugucagucgugugcccugga

SEQ ID NO: 4203256 - RNA, 89 nt, Human
uuuggguaguugauuucuguugaaacuaauuuccuuaagacauuuaucuuuuggaaauuucaucaauagccuguuugagacuaucugga

SEQ ID NO: 4203257 - RNA, 106 nt, Human
uuugggugcuuauuaaaaaugcaguuuccuggucucuacuucaagccuauuaauccaagcucucuaaguggagccagggaaacugaauguuaacaaacuauccagg

SEQ ID NO: 4203258 - RNA, 113 nt, Human
uuuggguguuauuuuugucuuacagguacaugucaaaaaaugcauaacacugaaauaacagagauuuaggcauaguuuugauaaauacacuaguauaauuagaauaucccaaa

SEQ ID NO: 4203259 - RNA, 127 nt, Human
uuuggguugucguggcugugggaggggagggagagcuuccuggcaucuguguagagaggcgaggcuuguugcuaacacccuccagugcgcaggacagccccagccccagccccagccccagcgaaga

SEQ ID NO: 4203260 - RNA, 113 nt, Human
uuugguaaauaacauaaaaccugaagguuuuguuugcaaaucaugucaguugccuucauaaauguacagguaaugauuuguuaacagacuuaaugaagguuuuaauuaccaga

SEQ ID NO: 4203261 - RNA, 83 nt, Human
uuugguagugguuucuuaggaaugagauuucuagugagcuugauguuuuucucucugaaauucauuccuaguggcauaccaaa

SEQ ID NO: 4203262 - RNA, 55 nt, Human
uuuggucaggguaggacaguugcauauuuuuaguauguaggucuaacugacuaaa

SEQ ID NO: 4203263 - RNA, 64 nt, Human
uuugguccuaagcugcucucuagcaugaugauccuagcuuuaaagagggaaacagcaggcuaag

SEQ ID NO: 4203264 - RNA, 63 nt, Human
uuuggucucauucacucaugggcacccuucuguuucgugguugccuguuggaugagguccaga

SEQ ID NO: 4203265 - RNA, 88 nt, Human
uuuggucugagcucaaaugauuggcuccugauuguccuguggucuagggaauuccuggggaagucggagccugagcaccagcacugag

SEQ ID NO: 4203266 - RNA, 60 nt, Human
uuuggucuuccaggggaagaauuuuuguaauaagcuugguucuuuccccagaggacuaaa

SEQ ID NO: 4203267 - RNA, 88 nt, Human
uuuggucuucucuugccugagaucaaagucagacuggaacuuacaccauaggcuuuccugauucucagguuuucagacuuggacugga

SEQ ID NO: 4203268 - RNA, 80 nt, Human
uuugguguauauacugauccuuugacuuuguugagaaauguagggaaguaguaguaagaggaccaaauauauacauggaa

SEQ ID NO: 4203269 - RNA, 61 nt, Human
uuugguuuuuaccugcugagagccaucuuucaaggcuaguuucuaguaguuagagaccaaa

SEQ ID NO: 4203270 - RNA, 72 nt, Human
uuuguaaaaagguaaauuuauaguugaauuauuuguauagguaagucuuaugugauuuaucuuucuugcaaa

SEQ ID NO: 4203271 - RNA, 130 nt, Human
uuuguaaaauuucucuccaggauaaauacugugguguucucugagguguauauuuuggacaaaagucuuuccaaaauuauuacauuuguaggguuucuauccaguaccgauucuuuaauuuuuaguaaga

SEQ ID NO: 4203272 - RNA, 93 nt, Human
uuuguaaauuuugacuuugaaaggccauuguaauguaaauaugacuuccuagaguguaaacaacagugguuugaaauuaaaaauuuguacaaa

SEQ ID NO: 4203273 - RNA, 79 nt, Human
uuuguaagcacaagccagaagugugugguccauuuucucuuuaauaagaaaugccagcacacgucuguggacucgcaga

SEQ ID NO: 4203274 - RNA, 65 nt, Human
uuuguaagccuaaugcccagcaucugucuccugggcaucuguguccugggcauuaggcuuagaaa

SEQ ID NO: 4203275 - RNA, 62 nt, Human
uugcaaccuguacuuacuaaauccugguggaaaccacaguuugguugcuacaguaaaugcaa

SEQ ID NO: 4203276 - RNA, 67 nt, Human
uugcaagaugacuuucccaaagguuguauuccuacauuccuacaagcuuauuaaguuaucugugcaa

SEQ ID NO: 4203277 - RNA, 76 nt, Human
uugcaagcccaggauccuacguuugaauggcaggugaauuacauauaccgacaaucacugggauauugguguguaa

SEQ ID NO: 4203278 - RNA, 92 nt, Human
uugcaaggaaaagccacuuggggaaagauggaaaaggacaaaaaaauuaauaaauuuccauuggcccucgggugagcugaggguuuuugcaa

SEQ ID NO: 4203279 - RNA, 101 nt, Human
uugcaaggcccagcccaggcacaggccucagcacccaggcaggcucagagcacuugagguuggaggccuugccuggcuagaugcucagcuguggccuguga

SEQ ID NO: 4203280 - RNA, 91 nt, Human
uugcaagggagcuggcaggaggcuccccgagacgaagcagguaaauguacucucaccugcugauugaugaguguccuguagcccuuggcag

SEQ ID NO: 4203281 - RNA, 63 nt, Human
uugcaaugccucaauuaaagccacuguacuuuucuaugugcagggccuuagggagggcuguaa

SEQ ID NO: 4203282 - RNA, 56 nt, Human
uugcacccauagcacacacuccuugcuaaaagccuaggaggacugugaugggucaa

SEQ ID NO: 4203283 - RNA, 61 nt, Human
uugcaccuccccuuuauaaaucuuuccauuuauuucugacucagguuuauggggaggguga

SEQ ID NO: 4203284 - RNA, 62 nt, Human
uugcagaauauauuacugagccuccugaagaauaggaaguuaucaaagauguauucucucaa

SEQ ID NO: 4203285 - RNA, 58 nt, Human
uugcagacagugagagugaaagguguuuuauucuuacuauugacucucaaauuugcag

SEQ ID NO: 4203286 - RNA, 60 nt, Human
uugcagauauuuccgaugcuauacaagauauaucucauaguauggguguagauucugcaa

SEQ ID NO: 4203287 - RNA, 70 nt, Human
uugcagccaaagagguucuccuuggaguggggucgccuccaaaccccaaauucccggcgcuucucugcaa

SEQ ID NO: 4203288 - RNA, 57 nt, Human
uugcagcuucgagucuaucuguggggacucagcuuuuucaauaacucuaggcuguaa

SEQ ID NO: 4203289 - RNA, 63 nt, Human
uugcaggcuccccauugaucugcaggcuacaucagccuaagaugaguggggagucuuaagcaa

SEQ ID NO: 4203290 - RNA, 55 nt, Human
uugcaguccaagagucuccuggugcucuuguacugugugcucuugacgacuguga

SEQ ID NO: 4203291 - RNA, 75 nt, Human
uugcagugauuugcacucugccuuucagcagaugaacaaaagugacagacauggaagccagaguuguggcugcaa

SEQ ID NO: 4203292 - RNA, 65 nt, Human
uugcagugucaucuagacgugguagaaaaauagauauacccaugccauguucugaauuacuguaa

SEQ ID NO: 4203293 - RNA, 57 nt, Human
uugcaguuuguggcaacuuugaucacauaggaaugauuccugguagccuuacugcaa

SEQ ID NO: 4203294 - RNA, 55 nt, Human
uugcauaacagccauuaaaguauuaguauuacuuugggggcacuugauuaugcaa

SEQ ID NO: 4203295 - RNA, 62 nt, Human
uugcauaaugugggagaccuucccuaccccaggaaagcuggagagugaaggcuucccagcaa

SEQ ID NO: 4203296 - RNA, 55 nt, Human
uugcauauucaugucggcugaaaaagcaguuaaaugcuggcugaacugaaagcaa

SEQ ID NO: 4203297 - RNA, 60 nt, Human
uugcaucagguagacaacuauaaugauauaaguaagcaauaguugagaaccugacagcaa

SEQ ID NO: 4203298 - RNA, 64 nt, Human
uugcaucucaucaagccuagaccuaugucccaguuuacaggagguucaggagauggaggaacaa

SEQ ID NO: 4203299 - RNA, 62 nt, Human
uugcaugcaaaucuuaaguauguguguauaaauauacauauacugagugauuugcuuugcaa

SEQ ID NO: 4203300 - RNA, 77 nt, Human adenovirus A
aucgcgaugguaaucuugguucgcuaguagcauuaaacgcuuuuuugaguacucagccggcuaauguuccgcguggu

SEQ ID NO: 4203301 - RNA, 83 nt, Human adenovirus A
acggucauuuccaggccaacucacggaggagucaaacaugauugacaccuucuuaaaagugugguuuagguaaaaggugccgu

SEQ ID NO: 4203302 - RNA, 73 nt, Human adenovirus A
gucauugccagcguccggguucacuacaguguaugucagcugggaugcuuuugggacgcugguucaaaauggc

SEQ ID NO: 4203303 - RNA, 62 nt, Human adenovirus A
gucuacggcuaggggcuguggcucggcgcugaaaaguugucccacgguacccaggcgugggc

SEQ ID NO: 4203304 - RNA, 86 nt, Human adenovirus A
gacuuaaugaacaaugcuauuauugagcauuauuugcgaguaggaagacagcauggagugcuggaaagugacauuggaguuaaguu

SEQ ID NO: 4203305 - RNA, 113 nt, Human adenovirus A
gcggcuuguucuagcaguauuugguuacgccgggcucguaccccauucacccuggaaaucaugugggguccggcgcuuaaccaauucauuuugcuagaauagucuugagccgc

SEQ ID NO: 4203306 - RNA, 63 nt, Human adenovirus A
ggaugaguguauggaaaauuugggaagucacaaaggcguuuccaaguuuuuccaugccuuucc

SEQ ID NO: 4203307 - RNA, 56 nt, Human adenovirus A
gggcgcucuuguguuaagugugagggcacuagccuuuacugcuaggggggcgcucc

SEQ ID NO: 4203308 - RNA, 66 nt, Human adenovirus A
gugguuguacuuugcuuuuuugacggaacgccaacgcugcaaacaaaaaggacgaggugcgauaac

SEQ ID NO: 4203309 - RNA, 66 nt, Human adenovirus A
ucacuugugcucauagcggauccugccgguuucgaaccgggguuccucgcuaugguacccuuguga

SEQ ID NO: 4203310 - RNA, 70 nt, Human adenovirus A
ugguauccaauguuguaaugacuaagcauuuguauuaggaaccaauccuuagucauauugcauugggcca

SEQ ID NO: 4203311 - RNA, 106 nt, Human adenovirus A
cagcugagcaguuagaguuucaagcuuggcaagcauaacagucagaauguccucucgaacugcggugcgugucacagcauucgaagccaagugauuguagaagcug

SEQ ID NO: 4203312 - RNA, 59 nt, Human adenovirus A
ugaaagcacuggcggguaccaagggucuguuugcacgcuugcguucaccguuguuuuua

SEQ ID NO: 4203313 - RNA, 60 nt, Human adenovirus A
uugcugcuggcuucugauuuguaugauuuuauacaacuggcauuaagaugucagcugcga

SEQ ID NO: 4203314 - RNA, 73 nt, Human adenovirus C
cagaccccccaucuauaggccuaucauugugcucaacccacacaaugaaaaaauucauagauuggacggucug

SEQ ID NO: 4203315 - RNA, 58 nt, Human adenovirus C
cggcagcugcagcuucuuuuugggugccauccugggaagcaagggcccgcggcugcug

SEQ ID NO: 4203316 - RNA, 69 nt, Human adenovirus C
gaccguccaaucuaugaauuuuuucauuguguggguugagcacaaugauaggccuauagaugggggguc

SEQ ID NO: 4203317 - RNA, 60 nt, Human adenovirus C
gagcggugcggggugcauagguugcagcgacagugacacuccaguaggccgucaccgcuc

SEQ ID NO: 4203318 - RNA, 98 nt, Human adenovirus C
uucugcagacuaacuuugccugggaggagccccacagaaaccuccaaaaccaagagguacuguuagagcucuguuccagcaaguuacgcacagcagaa

SEQ ID NO: 4203319 - RNA, 60 nt, Human adenovirus C
uugccacugccacagagggcauggagacacaaacguccccgguugccucggcgguggcag

SEQ ID NO: 4203320 - RNA, 71 nt, Human adenovirus C
cauccccgcccuguucggugucaucuuuuaagcuugccugguaggcguccacauccaacagugcgggaaug

SEQ ID NO: 4203321 - RNA, 80 nt, Human adenovirus C
ccacugucauuguuccagucccgguucccugcagugcauagccggcgggcagguuuuggccagcugguuuaggauggugg

SEQ ID NO: 4203322 - RNA, 62 nt, Human adenovirus C
ccuccugcuguugcuccuccgucgguauuauugccgggcggacggaagacaacaguagcagg

SEQ ID NO: 4203323 - RNA, 67 nt, Human adenovirus C
cuccuagccgcgccaggcccucgcccuccuccaaguccagguagugccgggcccggcgccgcggggg

SEQ ID NO: 4203324 - RNA, 58 nt, Human adenovirus C
cugaaagcaauguaauugggucuguuuggcauagauuguugacccaacauagcuuuag

SEQ ID NO: 4203325 - RNA, 70 nt, Human adenovirus C
gcgcucgaucaucuccccgcggcgacggcgcauggucucggugacggcgcggccguucucgcgggggcgc

SEQ ID NO: 4203326 - RNA, 87 nt, Human adenovirus C
gggcgguaaccgcauggaucacggcggacggccggauccgggguucgaaccccggucguccgccaugauacccuugcgaauuuaucc

SEQ ID NO: 4203327 - RNA, 89 nt, Human adenovirus C
gguggauaaauucgcaaggguaucauggcggacgaccgggguucgaaccccggauccggccguccgccgugauccaugcgguuaccgcc

SEQ ID NO: 4203328 - RNA, 61 nt, Human adenovirus C
gugagugcgcccauggacauaaaguuacuggagaaugggaugcgccaaagggugcgaucgc

SEQ ID NO: 4203329 - RNA, 108 nt, Human adenovirus C
uuguugcagagcguuugccgcgcguuucucgucgcguccaagacccucaaagauuuuuggcacuucgucgagcgaggcgauaucagguaugacagcgcccugccgcaa

SEQ ID NO: 4203330 - RNA, 68 nt, Human adenovirus C
auccuacacgguguaagcuucuauggguuuaacaauaccuguguggaagccuggaccgauguaagggu

SEQ ID NO: 4203331 - RNA, 64 nt, Human adenovirus C
ccccgcggcgccgggcccggcacuaccuggacuuggaggagggcgagggccuggcgcggcuagg

SEQ ID NO: 4203332 - RNA, 82 nt, Human adenovirus C
cgggcgcaggguccucgucagcguagucugggucacggugaaggggugcgcuccgggcugcgcgcuggccagggugcgcuug

SEQ ID NO: 4203333 - RNA, 55 nt, Human adenovirus C
gaucaugucuaccugcggggcgaugaagaaaaccguuuccgggguaggggagauc

SEQ ID NO: 4203334 - RNA, 125 nt, Human adenovirus C
ccucuuucagcgccugcgaaacuacgccgucuucgcccggcacguggagcucaaucucgcgcagguggucaugcgcgcccgcgaugccgaagggggcguggucuacagccgcgucuggaacgagg

SEQ ID NO: 4203335 - RNA, 59 nt, Human adenovirus C
ccugguguaccaggaaagucccgcucccaccacugugguacuucccagagacgcccagg

SEQ ID NO: 4203336 - RNA, 91 nt, Human adenovirus C
gcaacaagcuuacauaggggcuacgcugguuagcauagcuccgaguaugcgugucauaaucaguguggguucuuuugucaugguuccuggc

SEQ ID NO: 4203337 - RNA, 76 nt, Human adenovirus C
gcaccacugcagagcuucaugcugcggggugguguuguagaugauccagucguagcaggagcgcugggcguggugc

SEQ ID NO: 4203338 - RNA, 74 nt, Human adenovirus C
gcccgguuccauguugcgcgcggucauguccagcgccacgcugggcguuaccccgucgcgcaucagguuaaggc

SEQ ID NO: 4203339 - RNA, 73 nt, Human adenovirus C
ggccucgcgguacagugucagcaagugaccuagguaugugucccgggacacgcugccacuguccgugaagggc

SEQ ID NO: 4203340 - RNA, 56 nt, Human adenovirus C
ugcaaaauuccaagguaggagaccagguugcagagcuccacguuggaaauuuugca

SEQ ID NO: 4203341 - RNA, 113 nt, Human adenovirus C
uugaugaaaagaaaaugccuugauuuuccgcuugcuuguauuccccuggacaauuuacucuaugugggauaugcuccaggcgggcaagauuauacccacaaccuucaaaucaa

SEQ ID NO: 4203342 - RNA, 56 nt, Human adenovirus D
acauguaacuuagucguagggcgccaucuugcccacguccaaaauggcuuacaugu

SEQ ID NO: 4203343 - RNA, 59 nt, Human adenovirus D
cagcgucugccucaggcgcucgggggaggacgaucucggccagguccgaggcgacggug

SEQ ID NO: 4203344 - RNA, 70 nt, Human adenovirus D
gcucgcgguugagggcguauuccucgucauccuuccaguacucccggagcgggaauccucgaucguccgc

SEQ ID NO: 4203345 - RNA, 55 nt, Human adenovirus D
gcugauuggccgagaaacguugaugcaaaugacgucacgacgcacggcuaacggu

SEQ ID NO: 4203346 - RNA, 78 nt, Human adenovirus D
ggcuaccugggaggagaggaggaugugcugcugaaacaccugcagcgccagucccucauccuccgggacgcccuggcc

SEQ ID NO: 4203347 - RNA, 95 nt, Human adenovirus D
gguaccuucgagcugcaagguccgcaggaguccaccgcuccgcugaaacucacgccgggguuguggacuuccgcguaccugcgcaaauuuguacc

SEQ ID NO: 4203348 - RNA, 56 nt, Human adenovirus D
ugagaggagugugauaugcacaguagucaucaaaugcgagcauacaugcccucuca

SEQ ID NO: 4203349 - RNA, 67 nt, Human adenovirus D
agguguaccagucgggcccggacuacuuuuuccaaacuagcagacagggccugcaaacggugaaccu

SEQ ID NO: 4203350 - RNA, 65 nt, Human adenovirus D
gcgucugcagcauugucugccuggucaucaccuuccugcagcucaucgacuggugcugcgcgcgc

SEQ ID NO: 4203351 - RNA, 116 nt, Human adenovirus D
agacacugcuccaauugaaggcgcccccguucagcuggcuggugccgaucucguuccaggugcccaugaacggccgcgugccgugccgcggagccagggacgcaaaauugaugucu

SEQ ID NO: 4203352 - RNA, 76 nt, Human adenovirus D
gcagauuuacagcuucgaguacgaggccaugcugcgccgaagcgccguggccucuucgcccgaccgcugucucagc

SEQ ID NO: 4203353 - RNA, 99 nt, Human adenovirus D
ggauguugauggcaucgaggagcuccuuggcggcacgcuccugcugcugacggacgcgcaguugcaggaugcgcugcucggaggccuggccguccaucu

SEQ ID NO: 4203354 - RNA, 72 nt, Human adenovirus D
ggcgucccggaggaugagggacuggcgcugcagguguuucagcagcacauccuccucuccucccagguagcc

SEQ ID NO: 4203355 - RNA, 105 nt, Human adenovirus D
guccgucaccagccgguccagguuggacugcacguuugugcuguuguagcggccuacgcgcuccagcagggcguuguacacuagcccggccucgucgggacggau

SEQ ID NO: 4203356 - RNA, 68 nt, Human adenovirus D
guggucaggaaguugcuguggucguuuugauaguucagggaagcgauguccgccgacuuguuguccac

SEQ ID NO: 4203357 - RNA, 59 nt, Human adenovirus D
ucacucccaggcccacaauacugugcagcgugcucugccaguucugggccuggcggcgg

SEQ ID NO: 4203358 - RNA, 86 nt, Human adenovirus D
ccaucuggaccaacuaaaguuacguuugacccacuagugacuguaauuaguuuugugucagguguguuuggcuuuaguuuagaugg

SEQ ID NO: 4203359 - RNA, 86 nt, Human adenovirus D
cgcggggccggaaccgccgcugccgccgggagcgcguccgcgacaccgcuucuaaaagcgcaccgcggcacggucguggccccgcg

SEQ ID NO: 4203360 - RNA, 59 nt, Human adenovirus D
gcguggugggcaugccggccuucacggccuccucguacgaaggcggcucguccaccugc

SEQ ID NO: 4203361 - RNA, 55 nt, Human adenovirus D
ggagggcauaucaauuuucuccugauagcagucuaagaaauuccauauguccgcc

SEQ ID NO: 4203362 - RNA, 71 nt, Human adenovirus D
uugagcuuaccuugcgacugcgauuggcuagacgcuuuccucgaaagauucuccgauccggucgaucucga

SEQ ID NO: 4203363 - RNA, 62 nt, Human adenovirus E
gaggacgacggucuggcggcggcugcuucuuccaccuccuccucugccuccuccucgucuuc

SEQ ID NO: 4203364 - RNA, 58 nt, Human adenovirus E
ggagaucuugcaggccuggcgcacgaacccgugccugaagagguagugcagguucucc

SEQ ID NO: 4203365 - RNA, 60 nt, Human adenovirus E
ccgugggcaucaugcugagggagucccuggacccggacccccugagcagcagcuugacgg

SEQ ID NO: 4203366 - RNA, 55 nt, Human adenovirus E
cgcuggcuccuggaccuggugaacauucugcagagcaucguggugcaggagcgcg

SEQ ID NO: 4203367 - RNA, 60 nt, Human adenovirus E
gguuguaccugguggacaacaagucggcggacaucgccucgcugaacuaccagaacgacc

SEQ ID NO: 4203368 - RNA, 62 nt, Human adenovirus E
ucccgaggaaucgagguccacccccucucccagcuugagggugauuuccccguucuuggugg

SEQ ID NO: 4203369 - RNA, 59 nt, Human adenovirus E
uuucaguauguggaaucaggcgguggacagcuaugauccugaugugcgcauuauugaaa

SEQ ID NO: 4203370 - RNA, 72 nt, Human adenovirus E
gaugcucugcagaauguucaccagguccaggagccagcggcccucgggcucggugauauucagcagcgccuc

SEQ ID NO: 4203371 - RNA, 61 nt, Human adenovirus E
ggcccgcgucugcuccugcagcugagccaccugcugggucagcucgcccaggcgcuggguc

SEQ ID NO: 4203372 - RNA, 94 nt, Human adenovirus E
guucgugcgccaggccugcaagaucuccaacguggagcugaccaaccuggucucguacaugggcaucuugcacgagaaccgccuggggcagaac

SEQ ID NO: 4203373 - RNA, 69 nt, Human adenovirus E
ucuugcugcccggcugcgggguggacuucaccgagagccgccucagcaaccugcugggcauucgcaaga

SEQ ID NO: 4203374 - RNA, 58 nt, Human adenovirus F
ugcagagccaccggaggcuggcggcuauuuuccagccgcugauugauuugguuuugca

SEQ ID NO: 4203375 - RNA, 97 nt, Human adenovirus F
uuccaaagcuguuacaucagugguucuuaauccgcaggcagagcccuugguuuccgccugggagaaaggcauggauuuaaugauaaagcuaauggaa

SEQ ID NO: 4203376 - RNA, 80 nt, Human adenovirus F
gcucaaugaggcuuggcagucucuaccuaugcaacagaugauaagaugcacaguuagcgcccugucgcugccucaggggc

SEQ ID NO: 4203377 - RNA, 58 nt, Human adenovirus F
ggagaucuugcaggccugacgaacguagccaugacggaaggcauagugcagggacucc

SEQ ID NO: 4203378 - RNA, 69 nt, Human adenovirus F
ggcucccauccacguguagguuucgacgucguaggugacaaagaggcguucgacgcgaggaugagagcc

SEQ ID NO: 4203379 - RNA, 72 nt, Human adenovirus F
guaacguaugcuguuccgcccuuccguaggccccagguaacggggagggacguggagcgccugcagcguugc

SEQ ID NO: 4203380 - RNA, 64 nt, Human adenovirus F
uauugcggagccugagggucgcuggcuuuuggaccugguuaauauccuucagagcauuguggua

SEQ ID NO: 4203381 - RNA, 64 nt, Human adenovirus F
agcccaccuguaccgggucuuggaaaacauccauaaaguuuuaaacgaccgcgacagguggucu

SEQ ID NO: 4203382 - RNA, 70 nt, Human adenovirus F
ccuagaccaccugucgcggucguuuaaaacuuuauggauguuuuccaagacccgguacaggugggcuugg

SEQ ID NO: 4203383 - RNA, 73 nt, Human adenovirus F
gcaagcccauucugccaguuggggauuggcggcuagaaaaccgcgccauagcuggagggcaaaaugggcuugc

SEQ ID NO: 4203384 - RNA, 105 nt, Human adenovirus F
gccgugauugguaauuuggaaaaucgcaucuuuuuugacuuggcuguaauuuuucaccaacgcagcgguggggagaggugugaucuucgugacuugcacuuuggc

SEQ ID NO: 4203385 - RNA, 57 nt, Human adenovirus F
gucaaaauugauggucuggguaccggccucugucgggguaaagucauuauuuuguac

SEQ ID NO: 4203386 - RNA, 60 nt, Human adenovirus F
gccucugccaguguuaauacuaagcugguuguugcuuacugucaguggugcggcgguggc

SEQ ID NO: 4203387 - RNA, 57 nt, Human adenovirus F
gucgcccucuucugcaccugcacgcucuugcuguggguggaugauggagggaacgac

SEQ ID NO: 4203388 - RNA, 115 nt, Human adenovirus F
uggcaugcccaaggaaguguuauuuauggggagcguguuugucagagguaggcauuuuauauauauucgccugcuguaugaugggcacgcggcuauaguguuggagcgcaugucg

SEQ ID NO: 4203389 - RNA, 61 nt, Human adenovirus F
uugucguucccuccaucauccacccacagcaagagcgugcaggugcagaagagggcgacga

SEQ ID NO: 4203390 - RNA, 55 nt, Human astrovirus
cacuggguacacuggaggugcugucauaauagacccagcagacuuccauccagug

SEQ ID NO: 4203391 - RNA, 84 nt, Human coronavirus 229E
agccaaucuaccaguaaucagccuaucuacuuguugaucagccugaauagugucaagucugucauagauagccugaauagagcu

SEQ ID NO: 4203392 - RNA, 71 nt, Human coronavirus 229E
guuuuguuuguuaaugacaaaauuacugaauuccaauuggauuacaguauugaugucauugauaaugaaau

SEQ ID NO: 4203393 - RNA, 73 nt, Human coronavirus 229E
uguagguucuagcuuugaugguguuauguauggugguuuugaagaccaaccuaaucuucaaguugaaucugca

SEQ ID NO: 4203394 - RNA, 56 nt, Human coronavirus 229E
aggguauucguugugcuguaacugaugccaagugguauuguuaugacaagaacccu

SEQ ID NO: 4203395 - RNA, 130 nt, Human coronavirus 229E
aguuaugacuacguuaguuugcugguuaugcuacuuugugcaauuucuaaugaaugguauauuggugcuauuauuuuuagaauuugucguuuugguguugcauuuuuaccaguggaauacgugucuuacu

SEQ ID NO: 4203396 - RNA, 87 nt, Human coronavirus 229E
gguggcgucucuuuauuagcuacuaugacuacaagacaguuucaucagaaaugucugaaauccauaguagcuaccagaaaugccacc

SEQ ID NO: 4203397 - RNA, 81 nt, Human coronavirus 229E
uggcaagaaaauuaaacaugaaggugacugggauagcuuuuguaagacuauucaaucagcacuuucuguuguuucuugcua

SEQ ID NO: 4203398 - RNA, 84 nt, Human coronavirus 229E
uuaaugaaaaccaagcugucacgcaaauaccugcaacuagcauuguugcuaagcaaggugcuggugaugcuggccauucauuaa

SEQ ID NO: 4203399 - RNA, 85 nt, Human coronavirus 229E
uugcaaugucacauuuguuaacauuucucgcucugaguugcaaaccauugugccagaguauauugauguuaauaagacgcugcaa

SEQ ID NO: 4203400 - RNA, 80 nt, Human coronavirus 229E
aagcuuacgcuaugcauggauuuggugugcugcauauuuaauugcguauauuucuuuugcuccauggugguugugugcuu

SEQ ID NO: 4203401 - RNA, 114 nt, Human coronavirus 229E
caucaauuuuucguggugcugugucuuguggucauuaccagacuaacaucuauucacaaaauuuguguguggaugguuuugguguuaacaagauucagcccuggacaaaugaug

SEQ ID NO: 4203402 - RNA, 97 nt, Human coronavirus 229E
ccauuuugcaaaguguugcaucuucuuuuguugguaugccaucuuuuguugcauaugaaacagcaagacaagaguaugaaaaugcuguugcaaaugg

SEQ ID NO: 4203403 - RNA, 81 nt, Human coronavirus 229E
guggcuggucgcagugccauagaagacauacuuuuuagcaaacuuguuacuucuggacuuggcacuguggacgcagacuac

SEQ ID NO: 4203404 - RNA, 66 nt, Human coronavirus 229E
accagauguuaacaguuaaugugguugcauuucuuuaugcugcuauauugaaugguugcacauggu

SEQ ID NO: 4203405 - RNA, 79 nt, Human coronavirus 229E
cguuauuuuguuaagauuggagcuguuaaacauugccaaugugguacuguugcaacaugcuacaauucuguuaguaaug

SEQ ID NO: 4203406 - RNA, 64 nt, Human coronavirus 229E
gcagaggauguuuguacuuguuacgauaauaguauacaagguucauacgaacguuuuacucugu

SEQ ID NO: 4203407 - RNA, 83 nt, Human coronavirus 229E
gcaugagggcagaaccauuuaugguaauguuaguagacaggaucuuacuaaauacaccaugauggauuugugcuucgcucugc

SEQ ID NO: 4203408 - RNA, 61 nt, Human coronavirus 229E
gcuuuaacaccauuggccacaacaccugcacuuccaaaguuguggucaaggucucuggggc

SEQ ID NO: 4203409 - RNA, 100 nt, Human coronavirus 229E
ugcuuacaugccaauugcagacccuacacauuuugacauugaagaaguugaacuuuuagaugcagaguuuguagaaccaggcuguggugguauuuuggca

SEQ ID NO: 4203410 - RNA, 81 nt, Human coronavirus 229E
uucuacuugugcuuuuucaugcccuauuuuauguacgauaucgugaguaguuuugaggguuaugauuuuaaguauauagaa

SEQ ID NO: 4203411 - RNA, 62 nt, Human coronavirus 229E
uguaugagaagucuacaguauuacaagcugcuggucuuuguguaguaugugguucucaaaca

SEQ ID NO: 4203412 - RNA, 62 nt, Human coronavirus 229E
uuugaacaguguaauuaagcuccgcagauuuauuuucaagggugcuaauuucacuggucaaa

SEQ ID NO: 4203413 - RNA, 93 nt, Human echovirus 1
caugguguuauugguauagugaccaugggaggugaaggugucguugguuucgccgaugugcgagaccuucuauggcuagaggaugacgccaug

SEQ ID NO: 4203414 - RNA, 71 nt, Human echovirus 1
gaggcuuauagagucgaauugagcaccaacacuaaugccgggacucaaguguuuggcuuucaacugaaccc

SEQ ID NO: 4203415 - RNA, 89 nt, Human echovirus 1
guguucauggucgguaguccuugguguccagcuagucguaguccauuguacucggcacacaugggggccacugucaccguuaugggcac

SEQ ID NO: 4203416 - RNA, 78 nt, Human herpesvirus 1
agagcgacccgucccgggccuucgcggccacggccaacccgugggcgucgcagcgauuuucguacggggaccugcucu

SEQ ID NO: 4203417 - RNA, 66 nt, Human herpesvirus 1
agccccacgcagggucugcgagcaauaccugcccggggaaagcuacgccuaccucugccugggguu

SEQ ID NO: 4203418 - RNA, 65 nt, Human herpesvirus 1
agcgcgccacggccuccgcguucucgggcgugaguuccagggggacgggguaggccgugcccguu

SEQ ID NO: 4203419 - RNA, 56 nt, Human herpesvirus 1
cacccggagguuccggaggcgccgcgcggacggcgcggggcccccgcuuccggaug

SEQ ID NO: 4203420 - RNA, 79 nt, Human herpesvirus 1
cagccucggcccccugggccagacgaccgcgguuccggacuccguggaucugucucgccaggggcuggccguuacgcug

SEQ ID NO: 4203421 - RNA, 65 nt, Human herpesvirus 1
ccagcggccggccggcgcuuagggggaggaugucgccgacgccccuuggccgccccggcugcagg

SEQ ID NO: 4203422 - RNA, 89 nt, Human herpesvirus 1
cccagcuucaggcaggccgugugcaggcccugcaugccgauucccauggaccgcagguugucguugccgcgggugcacuggggcguggg

SEQ ID NO: 4203423 - RNA, 57 nt, Human herpesvirus 1
cccgcgcgucgacgggacccagguauccccccugccgggccugcggaggaccgcggg

SEQ ID NO: 4203424 - RNA, 67 nt, Human herpesvirus 1
ccgcgccgacucuggccucacccgcgaggagguacgugccguacguggguuccgggagcaggcgugg

SEQ ID NO: 4203425 - RNA, 82 nt, Human herpesvirus 1
ccguaugguguugcgcaggugcaugccccagguuccgccggacaccugcagcaaacggcaccacgugcgcggggccagacgg

SEQ ID NO: 4203426 - RNA, 77 nt, Human herpesvirus 1
ccugaucauacugcgccgcggcggcgucgcguccggugcgggggcuggcguuguugauggccacggugagagccagg

SEQ ID NO: 4203427 - RNA, 76 nt, Human herpesvirus 1
cgcguaucggcgucccggcgcggcgagcgucugacggucugucucuggcggucccgcgucgggucguggauccgug

SEQ ID NO: 4203428 - RNA, 69 nt, Human herpesvirus 1
cggcgcuguggccucccguuccgggcccccguguaaagguuggucaggugaggccacagcggcaccccg

SEQ ID NO: 4203429 - RNA, 75 nt, Human herpesvirus 1
cgucucuccggagagcggcuuggugcggagcucccgggagcuccgcggaagacccaggccgccucggguguaacg

SEQ ID NO: 4203430 - RNA, 73 nt, Human herpesvirus 1
cgugucgauggccgucuuugacgagccgcccaccgacaucuccgcguggccgcuguucgagggccaggacacg

SEQ ID NO: 4203431 - RNA, 64 nt, Human herpesvirus 1
cucgucgagcguaccgacgggcggcacaccuaucacgugacuggccgucaggagcucggcgcag

SEQ ID NO: 4203432 - RNA, 77 nt, Human herpesvirus 1
cugucgguggcccagacgccguacccggugagggucgcguugaugauauacugggcguggugauggacgaucgacag

SEQ ID NO: 4203433 - RNA, 81 nt, Human herpesvirus 1
gaagagggaagaagaggggucgggauccaaaggacggacccagaccaccuuugguugcagaccccuuucuccccccucuuc

SEQ ID NO: 4203434 - RNA, 81 nt, Human herpesvirus 1
gaagaggggggagaaaggggucugcaaccaaagguggucuggguccguccuuuggaucccgaccccucuucuucccucuuc

SEQ ID NO: 4203435 - RNA, 77 nt, Human herpesvirus 1
gaggggggagaaaggggucugcaaccaaagguggucuggguccguccuuuggaucccgaccccucuucuucccucuu

SEQ ID NO: 4203436 - RNA, 56 nt, Human herpesvirus 1
gccacggcggccgccgcgugcgccaggccccagccgaagcggccggccgccauggc

SEQ ID NO: 4203437 - RNA, 74 nt, Human herpesvirus 1
gcggagcgggcuggggcucgaggucgcucgguggggcgcgacgccgcagaacgcccucgagucgccguggccgc

SEQ ID NO: 4203438 - RNA, 70 nt, Human herpesvirus 1
ggacgucgaugccuuucaaaccgaccagucgaugggugaaaucgaccgggucucgagguaucgguucgcc

SEQ ID NO: 4203439 - RNA, 127 nt, Human herpesvirus 1
ggcgccggaggucgcgucggcguccagcucgacccgccggggcugcccggccgugaagcggcccguggcgucgcggccggccaccgccgcgcgggcccggcggcgcucgaugcggcccgcggaggcc

SEQ ID NO: 4203440 - RNA, 95 nt, Human herpesvirus 1
ggcgcgggcgccaagcgggccaccgucagcgaguucgugcaagucaaacacauugaccgcgugggccccgcuggcguuucgccggcgccuccgcc

SEQ ID NO: 4203441 - RNA, 129 nt, Human herpesvirus 1
ggcucacaaaccggcccccguccccgggcugcgucucggggucagccucgagcuggucgacgacggguacgauacagucgaagaggcucguguuguuuuccgaguagcggaccacggaggcccggaguc

SEQ ID NO: 4203442 - RNA, 70 nt, Human herpesvirus 1
ggcucauggccacggcggccgccgcgugcgccaggccccagccgaagcggccggccgccauggcguagcc

SEQ ID NO: 4203443 - RNA, 79 nt, Human herpesvirus 1
gggguguuccggacucaaccgccgaacccaggaacccgccgcuccugguguuuacgaacgaguuugacgcggaggcccc

SEQ ID NO: 4203444 - RNA, 69 nt, Human herpesvirus 1
gggucgcucgguauucgaggccacacgcgucaccuuaauaugcgaaguggaccugggaccgcgccgccc

SEQ ID NO: 4203445 - RNA, 61 nt, Human herpesvirus 1
ggucgaugcggcccgaggauugccggcaaaagugcgauagaggcucgggccgugggcgacc

SEQ ID NO: 4203446 - RNA, 81 nt, Human herpesvirus 1
guaaagcggcagccuucgcucuccauccugcaucagggccggggcuucggggugaaugagcugggcggccucccgcgugac

SEQ ID NO: 4203447 - RNA, 67 nt, Human herpesvirus 1
guacugcaccucgcugcgaaccagcccgggugugcuaauauccgggcugcgcgugcgggcgcaggac

SEQ ID NO: 4203448 - RNA, 115 nt, Human herpesvirus 1
guccguccagauucugcgggcauaggauaccauaauuuuauuggugggucguuuguucggggacaagcgcgcucgucugacguuugggcuacucgucccagaauuuggccaggac

SEQ ID NO: 4203449 - RNA, 55 nt, Human herpesvirus 1
gugucgcgugucgcgcaugcgcauaaaaaauuugguguggugccgccugugauac

SEQ ID NO: 4203450 - RNA, 86 nt, Human herpesvirus 1
guuguaggguuguuuccggacgucuucggaggccccgcggacaaucuggggggccuccgacggugcguuuaggagcacgcugcggc

SEQ ID NO: 4203451 - RNA, 59 nt, Human herpesvirus 1
uagcauaucacauaccccguuccgcuuccgcggggacccgggcggggguggauacgcug

SEQ ID NO: 4203452 - RNA, 76 nt, Human herpesvirus 1
uccucgugcccgggacccacguggcggccaacccacagguggaccgcgagggacacguggugcccggguucgaggg

SEQ ID NO: 4203453 - RNA, 63 nt, Human herpesvirus 1
ucggugcucuccaaggggcuguccuccgcaaacaggcccguggugguguuuggggggcagcga

SEQ ID NO: 4203454 - RNA, 84 nt, Human herpesvirus 1
ugagucaguggggaccacgcccccaacacggcgaccccgguccuuguguguuuguugugggggcgugucucuguguaugaguca

SEQ ID NO: 4203455 - RNA, 78 nt, Human herpesvirus 1
guggguguguaggcgaugcgggucccccgaguccgcgggaagggcguggguuuggcgcgcguaugcguauucgccaac

SEQ ID NO: 4203456 - RNA, 67 nt, Human herpesvirus 1
uccggucccgccgaacgcauacaugcccuauuaucucagggaguaugugacgcggcuggucaacggg

SEQ ID NO: 4203457 - RNA, 57 nt, Human herpesvirus 1
ucgucgucagcaccgucauccacaccuuaucguuuuuguguauuggugcgauggcga

SEQ ID NO: 4203458 - RNA, 56 nt, Human herpesvirus 1
ucuucgggggugccgacgcaggcgucgguaauggccgacgcaggcgcccccggcga

SEQ ID NO: 4203459 - RNA, 90 nt, Human herpesvirus 1
uguuuccgcccuugccgaauccagggaggguaccgucgacggccggggcgucuaucaggugccccccggccucgucgagguaggaacgca

SEQ ID NO: 4203460 - RNA, 79 nt, Human herpesvirus 1
aaacgcgggcguauuggucccaauggggucucggugggguaucgacagagugccagcccugggaccgaaccccgcguuu

SEQ ID NO: 4203461 - RNA, 68 nt, Human herpesvirus 1
agcgccccgacggccaggugcgugacugugguccgcgcgccaauggggucgggaaaaacuaccgcgcu

SEQ ID NO: 4203462 - RNA, 62 nt, Human herpesvirus 1
caucgggccagauucacgcuucccagguugcagaccccacuggaucgcuuggaggccggaug

SEQ ID NO: 4203463 - RNA, 72 nt, Human herpesvirus 1
cccaacgaucccacgggccgccggccgaugaggucgcaccggccagggucgcgcggcccgaaaacgucuggg

SEQ ID NO: 4203464 - RNA, 55 nt, Human herpesvirus 1
ccccgagccacgccagaaccuuggcaaaggucgacgggguggcguggcuucgggg

SEQ ID NO: 4203465 - RNA, 79 nt, Human herpesvirus 1
ccccgaugauggucccgacgccaacccaggccgcggcggggagccgagcccgcauggggggugucccggggcccagggg

SEQ ID NO: 4203466 - RNA, 62 nt, Human herpesvirus 1
ccccugcggcguugcgacauacaaaauacaccagggcguggaaguacucgcgagcgcggggg

SEQ ID NO: 4203467 - RNA, 80 nt, Human herpesvirus 1
cccggcggacaugcugggccuaccguggacuccauuuccgagacgacguggggggagcggugguugagcgcgccgccggg

SEQ ID NO: 4203468 - RNA, 58 nt, Human herpesvirus 1
ccgggcaugaaaacgaccuccacacggaccaccggaugggggugugcguucgaugcgg

SEQ ID NO: 4203469 - RNA, 84 nt, Human herpesvirus 1
ccgggggaugguaaggcgucgcggcguccuggaucgacgguaugugccaguuuggugggauuugcggcgccaccguccccacgg

SEQ ID NO: 4203470 - RNA, 63 nt, Human herpesvirus 1
ccguccgccuucuccgugacauacagggucauggauuggcuauggucgacguagggggcgcgg

SEQ ID NO: 4203471 - RNA, 69 nt, Human herpesvirus 1
cggacgucgaugccuuucaaaccgaccagucgaugggugaaaucgaccgggucucgagguaucgguucg

SEQ ID NO: 4203472 - RNA, 68 nt, Human herpesvirus 1
cggaguugacaaugcgcgcgauagagucgacguccguccccaggucgucgacucuaucgcgcgugccg

SEQ ID NO: 4203473 - RNA, 82 nt, Human herpesvirus 1
cucgcgggcccacgagccgcggcgcgccaggcgggcggccgaggcccagaccaccagguggcgcacccggacguggggcgag

SEQ ID NO: 4203474 - RNA, 60 nt, Human herpesvirus 1
gacgccccgcgcccccccacgcagaggcgccgccgcgccccccgugacgggcggggcguc

SEQ ID NO: 4203475 - RNA, 57 nt, Human herpesvirus 1
gagcuuguuuucgugggggacgaggaggacgucuccaagcuuuccgagggcgagcuc

SEQ ID NO: 4203476 - RNA, 57 nt, Human herpesvirus 1
gaguuagacaggcaagcacuacucgccucugcacgcacaugcuugccugucaaacuc

SEQ ID NO: 4203477 - RNA, 91 nt, Human herpesvirus 1
gauggcccuccaggcugucgacgcccccucccuguuugucgccuggcuggccgcucgguggcuccggggggcuuccggccugggggccguc

SEQ ID NO: 4203478 - RNA, 83 nt, Human herpesvirus 1
gcagacagacccaugguuuuuggauggccugggcauggaccgcauguacuggcgcgacacgaacaccgggcgucuguggcugc

SEQ ID NO: 4203479 - RNA, 65 nt, Human herpesvirus 1
gcccccccgcgcauggugccccgcaggaucuuguccagggccuguucgguaucgucguugggggu

SEQ ID NO: 4203480 - RNA, 59 nt, Human herpesvirus 1
gccccgccgcuugaucauuaucaccccguugcggggguccggagaucaugcgcgggugu

SEQ ID NO: 4203481 - RNA, 70 nt, Human herpesvirus 1
gcccgggcaaguaugccccccuggcgagcccagaccccuucuccccacaacauggagcauacgcucgggc

SEQ ID NO: 4203482 - RNA, 89 nt, Human herpesvirus 1
gccgugugccccagucgcacucgucccuggcucaggccgcgaaccaagaacagagucugugccgggcgcgugcgacgguggcgcgcggc

SEQ ID NO: 4203483 - RNA, 66 nt, Human herpesvirus 1
gcgcgauggcggcgucgagaccggugucguaggugacgauagugccgaggcgccgcccgaucgcgc

SEQ ID NO: 4203484 - RNA, 64 nt, Human herpesvirus 1
gcgcgugguccccggggacguggcgcuggaccaggccugcuuccggaucucgggcgccgcgcgc

SEQ ID NO: 4203485 - RNA, 60 nt, Human herpesvirus 1
gcgggccugucguguagauucgaaaccacggacgggugauugugucgcagggcggcccgc

SEQ ID NO: 4203486 - RNA, 59 nt, Human herpesvirus 1
ggcagggcguuguucuggucaaggagggucauuacguugacgacaacaacgcccauguu

SEQ ID NO: 4203487 - RNA, 85 nt, Human herpesvirus 1
ggccgaggcccagaccaccagguggcgcacccggacguggggcgagaagcgcacccgcgcgggggucgcgggggucgcggggguc

SEQ ID NO: 4203488 - RNA, 69 nt, Human herpesvirus 1
ggccgccggggcgcccgaggccucgaaccggcgucgcgccuccuccgccucgggcgccccccagaggcc

SEQ ID NO: 4203489 - RNA, 60 nt, Human herpesvirus 1
gggcccagcgcgaucuacgggagcugcggugccgggaucccgaggcgucgcugccggccc

SEQ ID NO: 4203490 - RNA, 81 nt, Human herpesvirus 1
gggcccgccaugcucacgcugcaggugcuggcccacaacauggccgaacgcacaacggcgcugcucugcucggcggcgccc

SEQ ID NO: 4203491 - RNA, 99 nt, Human herpesvirus 1
ggggcgggcggcgccggaguggcagggcccccguucgccgccugggucgcggccgcgaccccaggcgugccgggggaacucggagccgccgacgccacc

SEQ ID NO: 4203492 - RNA, 77 nt, Human herpesvirus 1
ggugucguuguuggugccgguggggcguaccgcguaaauacaucggugcagcggacuggcaccgaagacgguguacc

SEQ ID NO: 4203493 - RNA, 106 nt, Human herpesvirus 1
guaguuggugaucagguacaacaggcgcuccucccgggagagcggcggcccgcggcgcucgaaaaucgcagcgcuggcggccgucucgaggacgcgcuccagcugc

SEQ ID NO: 4203494 - RNA, 67 nt, Human herpesvirus 1
guccugcgcccgcacgcgcagcccggauauuagcacacccgggcugguucgcagcgaggugcaguac

SEQ ID NO: 4203495 - RNA, 101 nt, Human herpesvirus 1
guggccggggaccuggccccaugggcgguggaggaguuccggggcgcgcgggagcucauccaacgccgcaugggcuuauauagcgcguacgccaaggccac

SEQ ID NO: 4203496 - RNA, 73 nt, Human herpesvirus 1
ggggcuccggcgucgccugcacaggaaggaccccggggacggggcccgguuggcggcgacgcuucggggccuc

SEQ ID NO: 4203497 - RNA, 77 nt, Human herpesvirus 1
ggggggcguggggaaucgcguagguggcgcagauguccuugauggccugcaggucguacguggcccccgcgcccccc

SEQ ID NO: 4203498 - RNA, 72 nt, Human herpesvirus 1
ggggugccgcuguggccucaccugaccaaccuuuacacgggggcccggaacgggaggccacagcgccgucuu

SEQ ID NO: 4203499 - RNA, 79 nt, Human herpesvirus 1
ggggugccgcuguggccucaccugaccaaccuuuacacgggggcccggaacgggaggccacagcgccgucuuucucccc

SEQ ID NO: 4203500 - RNA, 70 nt, Human herpesvirus 1
gcccggcucgcgccgugcugacaaacgccuugcuguugggcgucuuccugugcacggccgacgccgcggu

SEQ ID NO: 4203501 - RNA, 99 nt, Human herpesvirus 1
gcgccuuuuccagcagcacgugcagcaucuggucggccgugccgcgcucaaacgccccgaggacggccuggacguugcgagcgagcuguuggauggcgc

SEQ ID NO: 4203502 - RNA, 109 nt, Human herpesvirus 1
gcggggucccgccguccccccagcgugcaggcugcggccgcgugguccgcgcagggcggggcgggccuggaggccggggcccgcgcgcugauggacgccguggacgcgc

SEQ ID NO: 4203503 - RNA, 66 nt, Human herpesvirus 1
ggagcugugccgccagacacgcguuuucgaucggguucaggucggcgugcaggaggcggacggccc

SEQ ID NO: 4203504 - RNA, 92 nt, Human herpesvirus 1
ggcgcgcgaaaucgguaaccggggcgaccgugucggggagggcaggcggccgccaacccuggguggucgcggaagccuggguggcgcgcgcc

SEQ ID NO: 4203505 - RNA, 76 nt, Human herpesvirus 1
ggcggacguggugccucagcguaacgccuacuauagcguucugaauacguuucaggcccuccaccgcuccgaagcc

SEQ ID NO: 4203506 - RNA, 77 nt, Human herpesvirus 1
ggcugcuccgugcuggccgcgggguuggggucgugggucgucacggcccgaagaugcguggcuaggcgcggggggcu

SEQ ID NO: 4203507 - RNA, 67 nt, Human herpesvirus 1
gggagugagggucgcgucgucuaugcgcuggaggugcgccgagaacagcgucacccgauuacucacc

SEQ ID NO: 4203508 - RNA, 59 nt, Human herpesvirus 1
gggggcggagcguugugugggcggggcguuugcuacgcucacgcgcaugcccgccacuc

SEQ ID NO: 4203509 - RNA, 57 nt, Human herpesvirus 1
ggguggcagcagcgccgggucucgcauuaggugauucagcucggcuugcgccugccc

SEQ ID NO: 4203510 - RNA, 88 nt, Human herpesvirus 1
ggugggcgcggacgaggcgucggcgggccucaccaugggcggcgaugcccuacgagugcccuuuuuagauuucgcgaccgcgaccccc

SEQ ID NO: 4203511 - RNA, 59 nt, Human herpesvirus 1
gucucguccguccggcaucuucggggcccaugaaccgaaacgcgagcugcacgcggggc

SEQ ID NO: 4203512 - RNA, 59 nt, Human herpesvirus 1
guucggacggcaggcacacguaacgcacgcuagggugugugcgucgcccgcgucuggac

SEQ ID NO: 4203513 - RNA, 105 nt, Human herpesvirus 1
uccgccacccugcgggcgacccggggggugcucugauagucucgcgugcccaaggcccgugaucgggguacuucgccgccgcgacccgccacccggugugcgcga

SEQ ID NO: 4203514 - RNA, 55 nt, Human herpesvirus 1
ucgaugugggggugaccuccgggcuggcggcugacccgggggaccccgauguggg

SEQ ID NO: 4203515 - RNA, 80 nt, Human herpesvirus 1
ugcugccgcccaccgauccccugcgcacacgggcccuggggauagccugcgcggccggggccucgauguggguggcggcg

SEQ ID NO: 4203516 - RNA, 77 nt, Human herpesvirus 1
acccagcuguuucccggccuggccgcccugugucuugacgcccaggcggggcggccggucgggucgacgcggcgggu

SEQ ID NO: 4203517 - RNA, 88 nt, Human herpesvirus 1
acgaccgggguggucagcacgcggcccccuagaaacucggcauacagggcgucgaugagaugggcugcgcugggcgccacugcgucgu

SEQ ID NO: 4203518 - RNA, 65 nt, Human herpesvirus 1
aucgccugggcggggcugguuuuuguucgacgauccgucaggucaagaaucccaucgcccgugau

SEQ ID NO: 4203519 - RNA, 65 nt, Human herpesvirus 1
ccgcaccgucccccgacgaccucuugcagacgguccgugaugcaaggacggcggggggccugcag

SEQ ID NO: 4203520 - RNA, 67 nt, Human herpesvirus 1
ccggccucuggcgucggcgcgugugggucuaccgcugagggaccaccggcgucggcgcccgggccgg

SEQ ID NO: 4203521 - RNA, 83 nt, Human herpesvirus 1
cggucucgacgccgccaucgcgcccuuucgccaccugucgccggcgucucgcgagggggcgcggcgacuggccgccgaggccg

SEQ ID NO: 4203522 - RNA, 68 nt, Human herpesvirus 1
cgugacgacagcuuuguaaagacucagggggagacuucgguggaguuugccuacagguuccugucgcg

SEQ ID NO: 4203523 - RNA, 69 nt, Human herpesvirus 1
cgugccugcugcgccuggccgaccagaagggcuuuauucugccggacacccaggggcgauuuaggggcg

SEQ ID NO: 4203524 - RNA, 66 nt, Human herpesvirus 1
cuccccugcggcguugcgacauacaaaauacaccagggcguggaaguacucgcgagcgcggggggg

SEQ ID NO: 4203525 - RNA, 81 nt, Human herpesvirus 1
gccggggugguagaguuugacaggcaagcaugugcgugcagaggcgaguagugcuugccugucuaacucgcuagucucggc

SEQ ID NO: 4203526 - RNA, 71 nt, Human herpesvirus 1
gccucggccacgggccgcagcggcaccgugcuggcggcggcgggggccguggaggugcugggggcggaggc

SEQ ID NO: 4203527 - RNA, 64 nt, Human herpesvirus 1
gcgaagcguucgcacuucgucccaauauauauauauuauuagggcgaagugcgagcacuggcgc

SEQ ID NO: 4203528 - RNA, 87 nt, Human herpesvirus 1
gcgccuugcguggggcucgggggcgagcugugcccgcgugauucuguuuaguuacgacgagcucgucccccccaacacgcgcuacgc

SEQ ID NO: 4203529 - RNA, 88 nt, Human herpesvirus 1
gcgugccggggugguagaguuugacaggcaagcaugugcgugcagaggcgaguagugcuugccugucuaacucgcuagucucggccgc

SEQ ID NO: 4203530 - RNA, 67 nt, Human herpesvirus 1
gcucucggcgggggccgucuggccggccguuaggcugggggcgcagauagccgcccccuccgagagc

SEQ ID NO: 4203531 - RNA, 78 nt, Human herpesvirus 1
gcuuugucuccauguccuuuugucaaucgguccgcgaacggagguaaucccggcacgacgacggacgcccgacaaggu

SEQ ID NO: 4203532 - RNA, 88 nt, Human herpesvirus 1
ggagucgggcacggcgccagugcucgcacuucgcccuaauaauauauauauauugggacgaagugcgaacgcuucgcguucucacuuc

SEQ ID NO: 4203533 - RNA, 60 nt, Human herpesvirus 1
ggcacgcgcgauagagucgacgaccuggggacggacgucgacucuaucgcgcgcauuguc

SEQ ID NO: 4203534 - RNA, 69 nt, Human herpesvirus 1
ggccagguccugucgggucacgaaugcgacguagugcgcguacgccguguccuucacggggcucugguc

SEQ ID NO: 4203535 - RNA, 94 nt, Human herpesvirus 1
gggacucugcgcgcuuccauaauacgcccugcgguacgcggcaagcacgcgcaccucgugguggacguauagcgugguaaggccgcguuguccc

SEQ ID NO: 4203536 - RNA, 82 nt, Human herpesvirus 1
gggcgaugucgagauccaggaugauguuugugauugccagcgcgccguugaauaucucguugcgauucacguacaucugccc

SEQ ID NO: 4203537 - RNA, 130 nt, Human herpesvirus 1
gggcguggccgcuauuauaaaaaaagugagaacgcgaagcguucgcacuuuguccuaauaauauauauauuauuaggacaaagugcgaacgcuucgcguucucacuuuuuuuauaauagcggccacgccc

SEQ ID NO: 4203538 - RNA, 129 nt, Human herpesvirus 1
gggcugaucgccugcgugcagcuggagcgcguccucgagacggccgccagcgcugcgauuuucgagcgccgcgggccgccgcucucccgggaggagcgccuguuguaccugaucaccaacuaccugccc

SEQ ID NO: 4203539 - RNA, 129 nt, Human herpesvirus 1
guccaccuccugccacuuggucauggugcagaccgacgggcgcuuuggcacccagucccaggccacggugaacuugggggucgugagcagguuccggguggucggcgccguggcccgggccuugguggu

SEQ ID NO: 4203540 - RNA, 68 nt, Human herpesvirus 1
gugguccagcugcucgagucccugccugucuucgaccagcacacgcgggacaucgcgcagcgcgccgc

SEQ ID NO: 4203541 - RNA, 55 nt, Human herpesvirus 1
gugugcacggaugagaucgcgccccaccugcgcugcgacaccuucccgugcaugc

SEQ ID NO: 4203542 - RNA, 77 nt, Human herpesvirus 1
ucggccgcgucguugccgucgucguccucguccucgucggacgacgaggacgaagaggaugcggacgacgaggacga

SEQ ID NO: 4203543 - RNA, 106 nt, Human herpesvirus 1
ucgugaucgccacgcugaugcaccacggggugcucccggcggccccgggggacgucccccgggacgcgaguacccacguuaaccccgacggcguggcgcaccacga

SEQ ID NO: 4203544 - RNA, 79 nt, Human herpesvirus 1
agaacacgcgguccccugugguguuuuugguuauuuuuauuaaaucucgucgacaaacagggggaaaggggcguggucu

SEQ ID NO: 4203545 - RNA, 55 nt, Human herpesvirus 1
agcguucgcacuucgucccaauauauauauauuauuagggcgaagugcgagcacu

SEQ ID NO: 4203546 - RNA, 75 nt, Human herpesvirus 1
cacccccuggcccucgguauaccccagcugcccguggagaaucucgcggaacagcaucguaccggggcuggggug

SEQ ID NO: 4203547 - RNA, 77 nt, Human herpesvirus 1
ccaccgggcccacgggcuuccggagacggcgcucuuggccgagaaccuccccggguugcucguacaccgcuuggugg

SEQ ID NO: 4203548 - RNA, 100 nt, Human herpesvirus 1
cccaggccggccgcguggccgucgagugccuggccgccugccgcgggauccuggaggcgcuggccgagggcuucgacggcgaccuggcggccgucccggg

SEQ ID NO: 4203549 - RNA, 57 nt, Human herpesvirus 1
cccaugcggcguuggaugagcucccgcgcgccccggaacuccuccaccgcccauggg

SEQ ID NO: 4203550 - RNA, 59 nt, Human herpesvirus 1
cccccgagucggacccggaggccccacgggcgauggccuccgaagggacggcuccgggg

SEQ ID NO: 4203551 - RNA, 56 nt, Human herpesvirus 1
cccgcgagucggagcuggagcugugucucacgcuguuugacucacgcgcucgcggg

SEQ ID NO: 4203552 - RNA, 62 nt, Human herpesvirus 1
ccggacccccaggcucgcccgggccggcaugugcaagggccuuguuugucuggcggauccgg

SEQ ID NO: 4203553 - RNA, 74 nt, Human herpesvirus 1
ccuuucaaagaagcucacauaguccccacccaggcugugcaggacacggaucucccggggggaagcgagauagg

SEQ ID NO: 4203554 - RNA, 89 nt, Human herpesvirus 1
cgaggcuguaguccccccaggccccuaggucgcgacggcucguaagcacgacgcggucggccgcggggcuuugcgggggggcguccucg

SEQ ID NO: 4203555 - RNA, 67 nt, Human herpesvirus 1
cgagguacggggcggcccgugcggguugcuuaaaugcgugguggcgaccacgggcugucauuccucg

SEQ ID NO: 4203556 - RNA, 77 nt, Human herpesvirus 1
cggagcucgcggcacgcgcgauagagucgacgaccuggggacggacgucgacucuaucgcgcgcauugucaacuccg

SEQ ID NO: 4203557 - RNA, 56 nt, Human herpesvirus 1
cgguuccgcgguaccccgagucgauaagacccaguauuacguggugcccggggcug

SEQ ID NO: 4203558 - RNA, 59 nt, Human herpesvirus 1
cgucgagcguaccgacgggcggcacaccuaucacgugacuggccgucaggagcucggcg

SEQ ID NO: 4203559 - RNA, 59 nt, Human herpesvirus 1
cguggacaggcucuggagcauccgcacgacugcggugauauuaccggagaccuucugcg

SEQ ID NO: 4203560 - RNA, 56 nt, Human herpesvirus 1
cguugcggagcaucccgcgccuuggccgugauggcacgcggggugguuccgucacg

SEQ ID NO: 4203561 - RNA, 129 nt, Human herpesvirus 1
cucgaucucccggacgacgacgcccccgaagaggcggggcuggcggcuccgcgccuguccuuucuccccgcgggacacacgcgcagacugucgacggcccccccgaccgaugucagccugggggacgag

SEQ ID NO: 4203562 - RNA, 66 nt, Human herpesvirus 1
cucgugggggaguuugagacggccgagcgccgcuuuaguuccggucaacccagccuucuccgcgag

SEQ ID NO: 4203563 - RNA, 78 nt, Human herpesvirus 1
gacacgcucgcgccagaggggcgagguccguuucguccaguacgacgagucggauuaugcccucuacgggggcucguc

SEQ ID NO: 4203564 - RNA, 57 nt, Human herpesvirus 1
gaugugcgucgcguuguaccugcgggcgaagaugcgguccauggcgucgcgggcguc

SEQ ID NO: 4203565 - RNA, 65 nt, Human herpesvirus 1
gcaagacgaucguccacggcguccaggcgcucaccaagcgccggaucgagguaccgucggugugc

SEQ ID NO: 4203566 - RNA, 105 nt, Human herpesvirus 1
gcaggcgcuaauauccaacacaauaucacagcccaucaacaggaggucaguguccgugguguacacguacgcgaccguguuggugugauagagguuggcgcaggc

SEQ ID NO: 4203567 - RNA, 80 nt, Human herpesvirus 1
gccacgcgcguggagucgaaggccagcgccagcucaaaaaacccggggccggcgcgcuccgcggccuccgcgaccguggc

SEQ ID NO: 4203568 - RNA, 130 nt, Human herpesvirus 1
ggguugacgcuggggguccugguggcgucggcggcuccgaguucccccggcacgccuggggucgcggccgcgacccaggcggcgaacgggggcccugccacuccggcgccgcccgccccuggcgcccccc

SEQ ID NO: 4203569 - RNA, 55 nt, Human herpesvirus 1
ggucccggcgcuggcgguaagugaauaccagguacagaaacgccgcgcccgggcc

SEQ ID NO: 4203570 - RNA, 67 nt, Human herpesvirus 1
ggucgucggcgggcugacgaucggaggcagcgcgcgcuacugguggaucggugggcccgccgcggcc

SEQ ID NO: 4203571 - RNA, 81 nt, Human herpesvirus 1
guacacccccuggcccucgguauaccccagcugcccguggagaaucucgcggaacagcaucguaccggggcuggggugaac

SEQ ID NO: 4203572 - RNA, 66 nt, Human herpesvirus 1
guagggcgacaggauuugggaccuaccaacggaacgucuggacggaccccgguucugccgccggac

SEQ ID NO: 4203573 - RNA, 60 nt, Human herpesvirus 2
aacggcgcccggaggacggccguggcguaaaacagcgcucggcggaccaucggggcgguu

SEQ ID NO: 4203574 - RNA, 70 nt, Human herpesvirus 2
acauuguccacguaggugcugaagggggcgcucucaaacaccuccccgaagagcucccguaggauaaggu

SEQ ID NO: 4203575 - RNA, 62 nt, Human herpesvirus 2
agugguuaaaucgaccgugaugcuuuauugucugucgucugaacgcggucggggucgcuacu

SEQ ID NO: 4203576 - RNA, 130 nt, Human herpesvirus 2
caagcaacagcuagucguggcccggaacgacaucacguacguccucaacagccaggucgcggugaccgcgcgccuccgaaagaugguguuuggguucgacgggacguuucggaccuucgaggcugugcug

SEQ ID NO: 4203577 - RNA, 64 nt, Human herpesvirus 2
cacgaagccccggcggguuuguccgcuucguaacuucgauacguaacgcccugggguugccgug

SEQ ID NO: 4203578 - RNA, 60 nt, Human herpesvirus 2
cccgcggcgucgcgacagaccagauacagcagggcguggaggcagucgcgcgugcgcggg

SEQ ID NO: 4203579 - RNA, 120 nt, Human herpesvirus 2
ccgaggggccgcgggggucgagugggggcgagcccgggggagcggcgggggugcguugucgcgccggguccguuguaucuugucccggcagcucccgccgaccgcgccgcggccccccgg

SEQ ID NO: 4203580 - RNA, 63 nt, Human herpesvirus 2
ccgcgaauagcuacggccgcuugccaguccccaucggcauuccgguuggugcuguccgucugg

SEQ ID NO: 4203581 - RNA, 65 nt, Human herpesvirus 2
ccgggggggggcaagugcaguaacccaguuccucaguguuugggaaaucuauugaacucucccgg

SEQ ID NO: 4203582 - RNA, 75 nt, Human herpesvirus 2
cgacagccccaggggcuguucgggggucguagaugcggaaaacaucacgcccggcggacagccucuagggcgacg

SEQ ID NO: 4203583 - RNA, 65 nt, Human herpesvirus 2
cgcgggcccgguucgaggccucgggcgccccggcgcccgugugggcgcccgagcugggcgacgcg

SEQ ID NO: 4203584 - RNA, 82 nt, Human herpesvirus 2
cgcggggagcgaggggccguccgaacguuuuuaauuaccauaagcgggaauggcggcccguuaaaagcugcuaauuaccgcg

SEQ ID NO: 4203585 - RNA, 71 nt, Human herpesvirus 2
cgcggggccaacgugcgguaccgcgugcgcacgcgcuucggccccgacacgcuggugcccauguccccgcg

SEQ ID NO: 4203586 - RNA, 66 nt, Human herpesvirus 2
cugcugcagcuaggggagccgcccuccgccggggcccagcaacggcuccucgcgcugcugcagcag

SEQ ID NO: 4203587 - RNA, 129 nt, Human herpesvirus 2
gacccgcgcggcgccagccaccccgcgcucgcugucgcucuugcgccccaacagcaccuugacggacgcgguguugcgcagacggcagaugugcgcguguucccggagggcguggcacgcgacgaucuc

SEQ ID NO: 4203588 - RNA, 63 nt, Human herpesvirus 2
gagcaucgccuccagggcgugggcgcgcucccgaagccgggagcgcgccuccggagcgagcuc

SEQ ID NO: 4203589 - RNA, 59 nt, Human herpesvirus 2
gagggcggccucggccggcggagccccggagcuccgaaggucugcgcgaggccgcucuc

SEQ ID NO: 4203590 - RNA, 69 nt, Human herpesvirus 2
gccacccguggucucgggagcagggcgcgcccgcgccggccggcgacgcccccgcgggccacggggagu

SEQ ID NO: 4203591 - RNA, 104 nt, Human herpesvirus 2
gccagccaccccgcgcucgcugucgcucuugcgccccaacagcaccuugacggacgcgguguugcgcagacggcagaugugcgcguguucccggagggcguggc

SEQ ID NO: 4203592 - RNA, 66 nt, Human herpesvirus 2
gccccaggggcuguucgggggucguagaugcggaaaacaucacgcccggcggacagccucuagggc

SEQ ID NO: 4203593 - RNA, 69 nt, Human herpesvirus 2
gccggcgucccggucgccgccgcaccaggggcacaccggcugcgcggcggagaccgggacggcagcggc

SEQ ID NO: 4203594 - RNA, 90 nt, Human herpesvirus 2
gccggcguuucuguccgcggccaaacugcacgccgccacggcggcguuucuguugucgggcgcggcggucggcccggcggaggcgcgggc

SEQ ID NO: 4203595 - RNA, 58 nt, Human herpesvirus 2
gccugcuggccacguacgcaauuacgucuacgcuguugcuggcggcggccguguacgc

SEQ ID NO: 4203596 - RNA, 58 nt, Human herpesvirus 2
gcggaccuggugcccggacgucccgcgagcccuccccgccggacgccgccauggccgc

SEQ ID NO: 4203597 - RNA, 55 nt, Human herpesvirus 2
gcgggcgagggcgucuaaggccucgcgcaucucgcgggccuccgccucgacccgc

SEQ ID NO: 4203598 - RNA, 87 nt, Human herpesvirus 2
gcgucgucgcccuagaggcuguccgccgggcgugauguuuuccgcaucuacgacccccgaacagccccuggggcugucgggcgaugc

SEQ ID NO: 4203599 - RNA, 80 nt, Human herpesvirus 2
gcugcccgccucggagguggagucgcggugaaggucgucgucagagauucccaccucggucuccuccuccgagucgcugc

SEQ ID NO: 4203600 - RNA, 84 nt, Human herpesvirus 2
gcugcccgccucggagguggagucgcggugaaggucgucgucagagauucccaccucggucuccuccuccgagucgcugcuggc

SEQ ID NO: 4203601 - RNA, 57 nt, Human herpesvirus 2
gcuguacgcguguuccacgugcuccaggaugucguacacguggaagacggugacggu

SEQ ID NO: 4203602 - RNA, 91 nt, Human herpesvirus 2
ggacgaucccgggcccuuggguuccgcggacgccgggcggcaagaccugccccggcgcgucguccgucacgagccccugggccgcucguuc

SEQ ID NO: 4203603 - RNA, 85 nt, Human herpesvirus 2
ggagaguggcuccuggagcgcucgcgcgcccacccgaacacccuguucgcccccgccaccccgacgcacccggagccgcuucucc

SEQ ID NO: 4203604 - RNA, 63 nt, Human herpesvirus 2
ggaucgucggcuccccgccgcgcugccgggcgaggcgucgaggcuucgggggugccggcgucc

SEQ ID NO: 4203605 - RNA, 61 nt, Human herpesvirus 2
ggcccggguaccgcccgcguucccggaaccgccgggaaccaagcggaggcaccccggggcc

SEQ ID NO: 4203606 - RNA, 68 nt, Human herpesvirus 2
gggagaaggccgugguguugcggagcgccaccacgacgggcgcgccgaggagcaccgcggccagaacc

SEQ ID NO: 4203607 - RNA, 127 nt, Human herpesvirus 2
gggcccgcccccggcgcggcccgcggccagguccucgcccggcagcggcgaguagaggaucaccacgcgcacguccuccgggucgggcaccuggcgcauccaggccgccgcgcggcgcagcgggccc

SEQ ID NO: 4203608 - RNA, 104 nt, Human herpesvirus 2
ggggccagggcuggcaccguaucagcaccccaccgaaaaacggagcgggccgauccguccuuguuuucggucugguacucccuuugugcuuuuacccucacccc

SEQ ID NO: 4203609 - RNA, 130 nt, Human herpesvirus 2
ggggcgaagagaugcgggucgaggcggaggcccgcgagaugcgcgaggccuuagacgcccucgcccgcggggucgacucggucucgcagcgcgccgggccccugaccgugaugcccgugcccgccgcccc

SEQ ID NO: 4203610 - RNA, 62 nt, Human herpesvirus 2
ggucacccuggaguugcuccuggaguacgcguggcgcgagggggagcggcuccugggccacc

SEQ ID NO: 4203611 - RNA, 74 nt, Human herpesvirus 2
ggucuuccacgagcucgcggcaccccggcgggcgcuuaaacugcacgucgcuggcagcgguggccguggauacc

SEQ ID NO: 4203612 - RNA, 84 nt, Human herpesvirus 2
ggugacguuuuucucgccgucgagguggcggaucaggcgcuugaagaacagguccggcauccagagggcgcugaagauguuguc

SEQ ID NO: 4203613 - RNA, 56 nt, Human herpesvirus 2
gguggucccggagaucgcccccggugaggagugcccgagcgaucccgugaccgacc

SEQ ID NO: 4203614 - RNA, 61 nt, Human herpesvirus 2
guccguguugagcggaacgccccgggcgauggcguacccgggauccuccgccagcucggac

SEQ ID NO: 4203615 - RNA, 56 nt, Human herpesvirus 2
gucugggggccuuucucuguguggccaaaaguugcgcaucucgagggccccgggac

SEQ ID NO: 4203616 - RNA, 63 nt, Human herpesvirus 2
guggcgucggugguucuggucguggagcccgccccugugccgaccccgacccccgacgacuac

SEQ ID NO: 4203617 - RNA, 64 nt, Human herpesvirus 2
gugugcggccgcgacaugucccacagcuguaccgccgccagccgggcgugcguggccgccaggc

SEQ ID NO: 4203618 - RNA, 63 nt, Human herpesvirus 2
guguuuacggaggcgaguugcuggacgucggccacgagcgagagacgggccccguuguaauac

SEQ ID NO: 4203619 - RNA, 55 nt, Human herpesvirus 2
ucucauuagcgcccggcgcgggcggcuuccgcuuccgcccgcgaugcuaaugaga

SEQ ID NO: 4203620 - RNA, 68 nt, Human herpesvirus 2
uugguggcggcguagaugcgucucuccagggccuccaggaagaccagccugucgccuauggccaccag

SEQ ID NO: 4203621 - RNA, 60 nt, Human herpesvirus 2
accgguccccgccccguacguugugcacggcucccugacgaugcgugggguggcgagggu

SEQ ID NO: 4203622 - RNA, 55 nt, Human herpesvirus 2
acgcgggugcuggugucucggggaacgucgcccggggccgccgguagcaccccgu

SEQ ID NO: 4203623 - RNA, 80 nt, Human herpesvirus 2
augcugcucgcggccaugaagaccaguaacgcgcugugcguucgcggggcgcgucccuucagccacuuuaagcgcagcau

SEQ ID NO: 4203624 - RNA, 70 nt, Human herpesvirus 2
cccacaaaguccgggaggggccgcaggaccccuuggaguuugugcaggaacuucucccgggcgucguggg

SEQ ID NO: 4203625 - RNA, 75 nt, Human herpesvirus 2
ccggcgcgcucucgaccgcgguucccgagucguacgcagggaccauuugggagucugcgguugggagcgcgccgg

SEQ ID NO: 4203626 - RNA, 102 nt, Human herpesvirus 2
cgagccugcggcgcacgcucgugggggaguuugagacggccgagcgccgcuucagcgccggccagcccagccuccugcgcgagacggcgcucaucuggcucg

SEQ ID NO: 4203627 - RNA, 79 nt, Human herpesvirus 2
cgaggccgacgaugacgccccggaugacguggccuacccggaggacuacgcggaggggcguuuucuguccaugguuucg

SEQ ID NO: 4203628 - RNA, 101 nt, Human herpesvirus 2
cgcgcgcgcaugugcgccaguuccugcugcagggacgucaccgcccccaccagcgccgugaugguuucguggggcccggaagccuggcgcgcggcgcgccg

SEQ ID NO: 4203629 - RNA, 78 nt, Human herpesvirus 2
cgggacgggugaguucgcuaggcaagcacggacuggcgguuacacgugcaugcgugccgagugaacucucccgccccg

SEQ ID NO: 4203630 - RNA, 108 nt, Human herpesvirus 2
cgggcgcgggcgacgccauggcgcccggcgcgccggacuucugcgaggacgaggcgcacucgcaccgcgccugcgcgcgcuggggccugggcgcgccgcugcggcccg

SEQ ID NO: 4203631 - RNA, 85 nt, Human herpesvirus 2
cgggguaggguagacucgagacggcggcccgcggucucucucuugccggguuuuagucucugucucuccgggucuccuccucccg

SEQ ID NO: 4203632 - RNA, 84 nt, Human herpesvirus 2
cggugagcguccucgggcgcaugugucugccgagcgccgcuuuggccgcgcuguggaccugcauguuucccgacgacuacaccg

SEQ ID NO: 4203633 - RNA, 79 nt, Human herpesvirus 2
cucgcgcggggacaugggcaccagcgugucggggccgaagcgcgugcgcacgcgguaccgcacguuggccccgcggcag

SEQ ID NO: 4203634 - RNA, 58 nt, Human herpesvirus 2
cuggcgggcgggacgguggcucgcccccuuucauaggcgcgcgccaaccgcccaccag

SEQ ID NO: 4203635 - RNA, 129 nt, Human herpesvirus 2
gaccgccagcgggucguucagcaccaucccgauagugaacgacccccggacccgcguggaggccgaggcggccgugcgggccggcacggccguggacuuuaucuggacgggcaacccgcggacggcccc

SEQ ID NO: 4203636 - RNA, 81 nt, Human herpesvirus 2
gcaccgaugccgugccgcuggcguugcgccgagagaacgacacggagucgcggugccacgucagcuggcaggugaaggugc

SEQ ID NO: 4203637 - RNA, 94 nt, Human herpesvirus 2
gccccaggagcccggccucgucgaugacgauaauguugcugcgggugaaagccggcagcgccccgugugugaccgaggccaggcgcgugagggc

SEQ ID NO: 4203638 - RNA, 81 nt, Human herpesvirus 2
gcccgccucggagguggagucgcggugaaggucgucgucagagauucccaccucggucuccuccuccgagucgcugcuggc

SEQ ID NO: 4203639 - RNA, 84 nt, Human herpesvirus 2
gcccugggcccgggccgugcuggagcgccuggugccggacgcgugcgacgccugccccgcgcuccggcagcugcucggcggggu

SEQ ID NO: 4203640 - RNA, 93 nt, Human herpesvirus 2
gccgacgcccugcuggaggcgcaugacguguuucaggccacuacgcccggccuguacgccaucagcgagcugcgcuucuggcuggcguccggc

SEQ ID NO: 4203641 - RNA, 58 nt, Human herpesvirus 2
gcgcacggacggcgaccugcggcgcgggaacgcucgcggcgggggauguguccauggc

SEQ ID NO: 4203642 - RNA, 124 nt, Human herpesvirus 2
gcgcauauggacgaccgcguccgacggagaggccguggagcuugccagcgagacgcucaugaaacgcgaguugacgagcuucgcgguacuacucccccagggcgaccccgacguccagcugcgc

SEQ ID NO: 4203643 - RNA, 64 nt, Human herpesvirus 2
gcgcguggcgcccggggacguggcgcuggaccaggccugcuuccggaucucgggcgcggcgcgc

SEQ ID NO: 4203644 - RNA, 66 nt, Human herpesvirus 2
gcggacggcgucgucucgccgcggcagcuggcccugcuggccucgaugguggacgaggccguucgc

SEQ ID NO: 4203645 - RNA, 105 nt, Human herpesvirus 2
gcugcuguguccuccggacgugcgaucggaucccgcgagucgaaaucccacacagcagacccgugggugugcuagaucgaacgagcggcaggaucgcgugcuggc

SEQ ID NO: 4203646 - RNA, 71 nt, Human herpesvirus 2
gcuuuugggucgggcucagggccagcgcggccccgagaaacgcccgcggagcccccaccgacccaaacagc

SEQ ID NO: 4203647 - RNA, 104 nt, Human herpesvirus 2
ggacgacgggcgcccccgccucgccugcgugggugccaucgcucggggguucgcgcaucucuggcuccaggccgccacgcugggcuucguggggucugucguuc

SEQ ID NO: 4203648 - RNA, 127 nt, Human herpesvirus 2
ggccguccgcggguugcccguccagauaaaguccacggccgugccggcccgcacggccgccucggccuccacgcggguccgggggucguucacuaucgggauggugcugaacgacccgcuggcgguc

SEQ ID NO: 4203649 - RNA, 90 nt, Human herpesvirus 2
ggcuuaccgguuacacuguccgcucgcuaugggguucgucugucuguuugggcuugucguuaugggagccuggggggcgugggguggguc

SEQ ID NO: 4203650 - RNA, 83 nt, Human herpesvirus 2
gggacccgcaccgcggggcuuggagcgaccgaggccccccccgggccuacgagggcacaagccccggagguugcgucgguccc

SEQ ID NO: 4203651 - RNA, 77 nt, Human herpesvirus 2
gggccagcacguggccgugcuggccgccgcgacccaccgcacccccgccgcgcgcguuacggccauggaccugguuc

SEQ ID NO: 4203652 - RNA, 82 nt, Human herpesvirus 2
gggcgaggccgggucgcgggcggccgcgcccagggccgacaccgcguccgccagggcgccaugcgcccgcacggccgcgucc

SEQ ID NO: 4203653 - RNA, 130 nt, Human herpesvirus 2
gggcguggccgcccuucuaaaaaaagugagaacgcgaagcguucgcacuuuguccuaauaguauauauauuauuaggacaaagugcgaacgcuucgcguucucacuuuuuuuagaagggcggccacgccc

SEQ ID NO: 4203654 - RNA, 103 nt, Human herpesvirus 2
ggggcgaccaucgcccgccgccuggcggaccgcaucuguaaccacgucacccaacaggcccaggugcggcuggacgccaacgagcugcgacgguaccugcccc

SEQ ID NO: 4203655 - RNA, 113 nt, Human herpesvirus 2
gggucgcgggucccuggguaugcgcgggacccuggguucucugggagaucguggaacucgcgguucccugggcucucggggaacccggggcucccuggggacacguggugccc

SEQ ID NO: 4203656 - RNA, 116 nt, Human herpesvirus 2
guacucggucagguugguggugaagguggucgagauggcgucggaggagaagcggaaggagccgccguacucggcgcggagcaucucguccaccuccugccacuuggucauggugc

SEQ ID NO: 4203657 - RNA, 63 nt, Human herpesvirus 2
guccccgcccaggcuguggaggacgcggaucucccgcggggccgcggaaaacaugggcggggc

SEQ ID NO: 4203658 - RNA, 57 nt, Human herpesvirus 2
gucggcgcggggguggccaaacaggacccaggggucgacuuccaucuccgugauggc

SEQ ID NO: 4203659 - RNA, 88 nt, Human herpesvirus 2
gugacaaaccccggguuguccaggauaaaccgggugguggcgucgacgccccccucguacuuccugaucgcggggcaaaaguugucgc

SEQ ID NO: 4203660 - RNA, 99 nt, Human herpesvirus 2
gugggccacgucgucgggguucacgcgggugcuggugucucggggaacgucgcccggggccgccgguagcaccccguggcgcaccaacguggcgaucac

SEQ ID NO: 4203661 - RNA, 123 nt, Human herpesvirus 2
guuguugaccacggccgucugaaacgccuggcgaagcugcugcggucgcgcccccggguccugggggcgcgacccgcggccggugccgcccuugccgaacccagggaggguguggucgacggc

SEQ ID NO: 4203662 - RNA, 59 nt, Human herpesvirus 2
acgcaccuccgggccgagguguacagggaccagacccugcagcuacaccgggagggcgu

SEQ ID NO: 4203663 - RNA, 61 nt, Human herpesvirus 2
cacggccgacguccccagcgugugugucaccgccaccggccccaacgcggugucggcggug

SEQ ID NO: 4203664 - RNA, 87 nt, Human herpesvirus 2
ccgcgcgccccggucgcgcaugacccaggcucagaccgacacccaagcacagagucugggccgggcaggcgcgaccgacgcgcgcgg

SEQ ID NO: 4203665 - RNA, 66 nt, Human herpesvirus 2
ccucggccgguggcgacgacggcgacggggacugguuccccgacgccgguggucccggcgacgagg

SEQ ID NO: 4203666 - RNA, 56 nt, Human herpesvirus 2
cgagguuggccccguucaagaccaucucgccguaggucaccggcacgucggccucg

SEQ ID NO: 4203667 - RNA, 74 nt, Human herpesvirus 2
cgcgcucgcugucgcucuugcgccccaacagcaccuugacggacgcgguguugcgcagacggcagaugugcgcg

SEQ ID NO: 4203668 - RNA, 55 nt, Human herpesvirus 2
cgcuguucgaggccacgcgcgucaccuuaauaugcgaaguggaccucgggccgcg

SEQ ID NO: 4203669 - RNA, 61 nt, Human herpesvirus 2
cggcagggcguuucguuggucuaggaggguaaccacacuuacaacaacaacgcccaugucg

SEQ ID NO: 4203670 - RNA, 71 nt, Human herpesvirus 2
cggcaugguggaccgcgggcucggccggcaccucuggcgccugacgcgccgcgcccccccguccgccgccg

SEQ ID NO: 4203671 - RNA, 62 nt, Human herpesvirus 2
cggccugcccgcgaagaaacucucgcaccgcacccugcguuccgugcggaugcggguagcug

SEQ ID NO: 4203672 - RNA, 74 nt, Human herpesvirus 2
cuacgacugucugauccacagcaccccgaacacgcucgucgagcgggggcugcagucggcgcugaaguacgaag

SEQ ID NO: 4203673 - RNA, 67 nt, Human herpesvirus 2
cucgucggcggccccgcggagguuguacaaaaagcucgugcuggccuucccgguguuggucgacgag

SEQ ID NO: 4203674 - RNA, 93 nt, Human herpesvirus 2
cugcgcuuugggcagcuugucgucgcgguagcgguacugcgggcguccgcucucgucgccgauuaccgcggccagacgcgccagguagcgcgg

SEQ ID NO: 4203675 - RNA, 73 nt, Human herpesvirus 2
cuggcgaucacguacagcucgcgcagcagcugcucgauguugucggccaucugcaucgugggcccgacgccgg

SEQ ID NO: 4203676 - RNA, 76 nt, Human herpesvirus 2
gacggcggacccgcggaggaggaggaggcggcggcggcggcgcgcggguccuccgccgccgcgggcccgggccguc

SEQ ID NO: 4203677 - RNA, 70 nt, Human herpesvirus 2
gccucggagguggagucgcggugaaggucgucgucagagauucccaccucggucuccuccuccgagucgc

SEQ ID NO: 4203678 - RNA, 66 nt, Human herpesvirus 2
gcgccccgacggcccggugcguaacugugguccgcgcgccaaugggcucgggaaaaacuaccgcgc

SEQ ID NO: 4203679 - RNA, 88 nt, Human herpesvirus 2
gcggaaaaacggaggauggaagggcagaagauggggagucccgauccuccuccugcauccccucgccuuccauucuccggcccuccgc

SEQ ID NO: 4203680 - RNA, 82 nt, Human herpesvirus 2
gcggcuuggcgguccccggcacgagggugagcacgucguugaggacguccucgcccgcggcccgggggcccccccggcuggc

SEQ ID NO: 4203681 - RNA, 110 nt, Human herpesvirus 2
gcgucgcaucucagcgagcgcguaguucaggagcccaaagucguccuccgugaggcggggggcgcugccgaagguucgugggggcacgcgcuugcucuccucgcgggcgc

SEQ ID NO: 4203682 - RNA, 62 nt, Human herpesvirus 2
gcugcagcagcgcgaggagccguugcugggccccggcggagggcggcuccccuagcugcagc

SEQ ID NO: 4203683 - RNA, 88 nt, Human herpesvirus 2
gcuuucgcugaugcgcucgaccgccgcgcgcucggauauggaucgcagaaccgcccgaacggcggggucgauggugucggcagagggc

SEQ ID NO: 4203684 - RNA, 63 nt, Human herpesvirus 2
ggacgccggcacccccgaagccucgacgccucgcccggcagcgcggcggggagccgacgaucc

SEQ ID NO: 4203685 - RNA, 130 nt, Human herpesvirus 2
ggaggcguuccgggcguucauccgguccauccccaaccccggcgugcgcuacuucgcgcccgggcgcguuccgggcccggaggaggcgcucgucacccaagaccgggacuggcucgauucccgcgccgcc

SEQ ID NO: 4203686 - RNA, 59 nt, Human herpesvirus 2
ggcagggcguuucguuggucuaggaggguaaccacacuuacaacaacaacgcccauguc

SEQ ID NO: 4203687 - RNA, 63 nt, Human herpesvirus 2
ggcgccagggccacgacgcucgagacccccgcgaugggcagguagcgcgugaggccgggcgcc

SEQ ID NO: 4203688 - RNA, 78 nt, Human herpesvirus 2
ggcuggagaccgagcucguguucgugggggacgaggaggacgucuccaagcucuccgagggcgagcucggcuucuacc

SEQ ID NO: 4203689 - RNA, 71 nt, Human herpesvirus 2
gggcgccagcgcucgcacuuugcccuaauaauauauauacuauuaggacgaagugcgaacgcuucgcguuc

SEQ ID NO: 4203690 - RNA, 61 nt, Human herpesvirus 2
guccgagcuggcggaggaucccggguacgccaucgcccggggcguuccgcucaacacggac

SEQ ID NO: 4203691 - RNA, 91 nt, Human herpesvirus 2
guggcucgccagcagcgacucggaggaggagaccgaggugggaaucucugacgacgaccuucaccgcgacuccaccuccgaggcgggcagc

SEQ ID NO: 4203692 - RNA, 97 nt, Human herpesvirus 2
guuccccacccugcccgccacccgcgacgagcugccuucguacuacgaggccauggcgcaguuuuuccgcggugagcugcgggcgcgggaggagagc

SEQ ID NO: 4203693 - RNA, 77 nt, Human herpesvirus 2
uccggcgucgccucggggcuccgccagggcgcccugguccaccaggccgucagcgggggagcccugggcgcgucgga

SEQ ID NO: 4203694 - RNA, 57 nt, Human herpesvirus 2
uccuucgccgacgccuucccugugauccgcacgggcguccccggugucuccgauaga

SEQ ID NO: 4203695 - RNA, 55 nt, Human herpesvirus 2
ucgaccccgccguucgggcgguucugcgauccauauccgagcgcgcggcggucga

SEQ ID NO: 4203696 - RNA, 55 nt, Human herpesvirus 2
uggaucuccgcgcagacaucgccauacguccggugugugcaccgcgaagaaucca

SEQ ID NO: 4203697 - RNA, 71 nt, Human herpesvirus 2
uucggccuuccgccggcccgggggcccccggggaccuggaggcccaagaugccggcgguagcacccccgaa

SEQ ID NO: 4203698 - RNA, 56 nt, Human herpesvirus 2
acguacugcagggccucgagcucggccaugacgcgcucgguggccgcgcgguacgu

SEQ ID NO: 4203699 - RNA, 55 nt, Human herpesvirus 2
acugggccgucgugcgggccaggaucgccuuggccccgaacacaaccggcucggu

SEQ ID NO: 4203700 - RNA, 66 nt, Human herpesvirus 2
agaccugguuuuuggugccccucaucgcgcugucgcucgcguccuuccgggggaucaagauaggcu

SEQ ID NO: 4203701 - RNA, 63 nt, Human herpesvirus 2
cacuuugacagcauguucgccuacgugaaacccaugaacuacgggccggacaugguguccgug

SEQ ID NO: 4203702 - RNA, 69 nt, Human herpesvirus 2
cccacgaagccccggcggguuuguccgcuucguaacuucgauacguaacgcccugggguugccgugagg

SEQ ID NO: 4203703 - RNA, 61 nt, Human herpesvirus 2
ccccgcccuccgcuacacgacccuggagauccccggggcccgcagcuucgggggcucgggg

SEQ ID NO: 4203704 - RNA, 65 nt, Human herpesvirus 2
ccccgcgaauagcuacggccgcuugccaguccccaucggcauuccgguuggugcuguccgucugg

SEQ ID NO: 4203705 - RNA, 91 nt, Human herpesvirus 2
cccgcccgacccccgcccgcccucaccgucggccaggucaucguccucgucguccgugccgggccacgggggggugggcgacagggcgcgg

SEQ ID NO: 4203706 - RNA, 87 nt, Human herpesvirus 2
ccgcgcgcgucggucgcgccugcccggcccagacucugugcuugggugucggucugagccugggucaugcgcgaccggggcgcgcgg

SEQ ID NO: 4203707 - RNA, 69 nt, Human herpesvirus 2
ccgcggagauggagguucagaucguacgcaacgacccgccgcuacgauacgauaccaaccuccccgugg

SEQ ID NO: 4203708 - RNA, 68 nt, Human herpesvirus 2
ccgggcuuccggcagcccggccuccccgaggcccgcgagggcggccaggagcugggccuggagcccgg

SEQ ID NO: 4203709 - RNA, 88 nt, Human herpesvirus 2
ccuccgcgaagcgcgcgcgcgccucccccgcggcgucgcgacagaccagauacagcagggcguggaggcagucgcgcgugcgcggggg

SEQ ID NO: 4203710 - RNA, 76 nt, Human herpesvirus 2
cgagcugcccugucugaacgccaggcguuacggccccgagugugauguuggcaaucucgagaccaacggcggcucg

SEQ ID NO: 4203711 - RNA, 62 nt, Human herpesvirus 2
cgcccccggggcuccaggaggccgccccgccgggccccccgcucagggagcuguggugggug

SEQ ID NO: 4203712 - RNA, 65 nt, Human herpesvirus 2
cgcgaagcguucgcacuucguccuaauaguauauauauuauuagggcaaagugcgagcgcuggcg

SEQ ID NO: 4203713 - RNA, 120 nt, Human herpesvirus 2
cgcgcggcgccagccaccccgcgcucgcugucgcucuugcgccccaacagcaccuugacggacgcgguguugcgcagacggcagaugugcgcguguucccggagggcguggcacgcgacg

SEQ ID NO: 4203714 - RNA, 82 nt, Human herpesvirus 2
cgcgcuuaugggcggccggccgcccgggugagcgugacgucaaagggggcguggccgcccuucuaaaaaaagugagaacgcg

SEQ ID NO: 4203715 - RNA, 95 nt, Human herpesvirus 2
cgucguccaggguggggcugaucugaauuucccgcagaaccucgaccaguaggucuguuguguuugcugggaacucgcccgccguuggggauacg

SEQ ID NO: 4203716 - RNA, 64 nt, Human herpesvirus 2
cucggaggaggagaccgaggugggaaucucugacgacgaccuucaccgcgacuccaccuccgag

SEQ ID NO: 4203717 - RNA, 72 nt, Human herpesvirus 2
cucguacccgggcaccacguggcccucgcgguccagcugcggguuggccgccacgugcgugccgggcacgag

SEQ ID NO: 4203718 - RNA, 78 nt, Human herpesvirus 2
gacgagguuccgcccgaccgcacccuguuugcgcacguggcccugugcgccaucgggcggcgccuuggaaccaucguc

SEQ ID NO: 4203719 - RNA, 67 nt, Human herpesvirus 2
gaggccgucgaacagaucgggccgcaucaucugcucggcguacgcggcccauaggaucucgcggcuc

SEQ ID NO: 4203720 - RNA, 77 nt, Human herpesvirus 2
gcagcgacucggaggaggagaccgaggugggaaucucugacgacgaccuucaccgcgacuccaccuccgaggcgggc

SEQ ID NO: 4203721 - RNA, 98 nt, Human herpesvirus 2
gcagcuccggggcaucauugcggagggcggggcggcggucgccagcagcguguuuguggcgaccgucaagagccugggcccccgcacccagcagcugc

SEQ ID NO: 4203722 - RNA, 70 nt, Human herpesvirus 2
gccagguccucgcccggcagcggcgaguagaggaucaccacgcgcacguccuccgggucgggcaccuggc

SEQ ID NO: 4203723 - RNA, 70 nt, Human herpesvirus 2
gccaggugcccgacccggaggacgugcgcguggugauccucuacucgccgcugccgggcgaggaccuggc

SEQ ID NO: 4203724 - RNA, 90 nt, Human herpesvirus 2
gcccgcccgcgacgagggucucauuagcaucgcgggcggaagcggaagccgcccgcgccgggcgcuaaugagaugccgcgcgggcggagc

SEQ ID NO: 4203725 - RNA, 70 nt, Human herpesvirus 2
gcgcgcccgauggucgugcugggccucagcaucagcaaauacuacggcauggccggcaacgaccgcgugu

SEQ ID NO: 4203726 - RNA, 79 nt, Human herpesvirus 2
gcgggggcugucgucuggcaugacacccagcucugcgaaggcggcguaugugcaggugcgugcgguagggcgcccccgc

SEQ ID NO: 4203727 - RNA, 66 nt, Human herpesvirus 2
gcugccgucccggucuccgccgcgcagccggugugccccuggugcggcggcgaccgggacgccggc

SEQ ID NO: 4203728 - RNA, 94 nt, Human herpesvirus 2
gcuggucgggcggaugacgcuuuccgcgccgucccggcccacgacgaccucgugcaggugggccgugaugcgcgggcggcgggucgccugccgc

SEQ ID NO: 4203729 - RNA, 83 nt, Human herpesvirus 2
gcuguauagggcgacggugcgcugguuuucggggauaaagcgggguagcaucccgaugcugucgaccgucacgcccuguuggu

SEQ ID NO: 4203730 - RNA, 80 nt, Human herpesvirus 2
ggaagggggggagaaagggguccguaaccaaagguggucugcguccuuuggauuccgaccccucgucucccccccugucc

SEQ ID NO: 4203731 - RNA, 76 nt, Human herpesvirus 2
ggagguggacgagaugcuccgcgccgaguacggcggcuccuuccgcuucuccuccgacgccaucucgaccaccuuc

SEQ ID NO: 4203732 - RNA, 86 nt, Human herpesvirus 2
ggcaacagaaggugggcgucgacgaggcgucggcgggccugacgcucggcggcgaugcgcugcgcgucccuuuuuuggauuuugcc

SEQ ID NO: 4203733 - RNA, 72 nt, Human herpesvirus 2
ggccgcguccguccgcacgcgcgccaucagcguccccgggggcgcgcacgccgaccgcgggcugacgcggcu

SEQ ID NO: 4203734 - RNA, 71 nt, Human herpesvirus 2
ggcgcgcccaccgguccuucgcgggggccggggcucuucuggucauggcccuuggacgggugggccuagcc

SEQ ID NO: 4203735 - RNA, 72 nt, Human herpesvirus 2
ggcggcggugccgucuggguggcuccccggggguuguggggggcaaaaaacccagacgccgcccgagccgcc

SEQ ID NO: 4203736 - RNA, 114 nt, Human herpesvirus 2
ggcguccucgccggcgaggaggcccagcgcugcgacaacaucuucagcgcccucuggaugccggaccuguucuucaagcgccugauccgccaccucgacggcgagaaaaacguc

SEQ ID NO: 4203737 - RNA, 56 nt, Human herpesvirus 2
gggcggugggucguggguguugagagcacacaggcgggacaccucgaucaccgucc

SEQ ID NO: 4203738 - RNA, 129 nt, Human herpesvirus 2
ggggcgucgggacucgcggagggccggagaauggaaggcgaggggaugcaggaggaggaucgggacuccccaucuucugcccuuccauccuccguuuuuccgcuuuccaccgccgccgccaccaccccc

SEQ ID NO: 4203739 - RNA, 59 nt, Human herpesvirus 2
guggccagcugccggggcagcgugugcugccugagaaacgcccccaggcgcugcgucgc

SEQ ID NO: 4203740 - RNA, 66 nt, Human herpesvirus 2
ucaccaccauucgcgugacggucugcgagggcaagaaccuccugcagcgcgcgaacgaguugguga

SEQ ID NO: 4203741 - RNA, 55 nt, Human herpesvirus 2
uccgcgucguggacaucauggcgcaguuucggaaacugcucaugggcgacgagga

SEQ ID NO: 4203742 - RNA, 55 nt, Human herpesvirus 2
ucgggaaggccucgucggacccauccuggccguggaacuggaaggcacaucucga

SEQ ID NO: 4203743 - RNA, 68 nt, Human herpesvirus 2
uucaccaacucguucgcgcgcugcaggagguucuugcccucgcagaccgucacgcgaaugguggugag

SEQ ID NO: 4203744 - RNA, 55 nt, Human herpesvirus 2
ucggugggcgaagacgugagggcucgcaggagaguggcgaccgucaaguccccga

SEQ ID NO: 4203745 - RNA, 66 nt, Human herpesvirus 2
ugguggccauaggcgacaggcuggucuuccuggaggcccuggagagacgcaucuacgccgccacca

SEQ ID NO: 4203746 - RNA, 89 nt, Human herpesvirus 3
aacguuuacccugaguguuuuuucuagcucuuggcgcuguucgcggauacaucuaccgaggcugguuagagagcgcuuagacagauguu

SEQ ID NO: 4203747 - RNA, 57 nt, Human herpesvirus 3
acaauuuugauacacugugcuugcaacacgcugggcuaaauguggcgagguaaaugu

SEQ ID NO: 4203748 - RNA, 69 nt, Human herpesvirus 3
ccgacgaacguccagggacgcgagguguuauaccccgggcaucauguuuccuugggcggguaucaucgg

SEQ ID NO: 4203749 - RNA, 118 nt, Human herpesvirus 3
cgaacaacgugccugaucugaacauacauugcgcguauguaaaucggugaagauuccccaaaauccaucuuuuauauaaguacauauagcaaagcccuguuccaaggccguuuguucg

SEQ ID NO: 4203750 - RNA, 64 nt, Human herpesvirus 3
cgccuuugcuuggguuucuauguccgcggcggacgugacaucuuuacgaauccaaugcaaaacg

SEQ ID NO: 4203751 - RNA, 61 nt, Human herpesvirus 3
cuguuuucccuuggcucuugugacuuaccacaaagguauguacaagaaaugaaggacgcgg

SEQ ID NO: 4203752 - RNA, 129 nt, Human herpesvirus 3
ggaggugcgguuaugucgcguugaccgucuagguaaggauccacgcgggugcacgucucaaccuaaagguauaggcaguucccacggacccuuagacggcauuuauuuaacguacgaagaaacaugucc

SEQ ID NO: 4203753 - RNA, 128 nt, Human herpesvirus 3
ggccguugggcaggccuccaaaaggcaauuugagcguuuuaaguuugggguacguuuuuaaagcuugauuggcaaacguuaccgcaaaucaaucuuagauccaagggauaauggccguugggcaggcc

SEQ ID NO: 4203754 - RNA, 66 nt, Human herpesvirus 3
ggucuccccggacgguccaaaccgcacccuguuggaugggaggggugccgauccgggccaagggcu

SEQ ID NO: 4203755 - RNA, 60 nt, Human herpesvirus 3
gguugugucggucucuccaagcucguuuuaugagaguuuacaaguagagcccacacaauc

SEQ ID NO: 4203756 - RNA, 67 nt, Human herpesvirus 3
gucuuaccgauuauaagagacugggacuuacaacauccgaguauaaacgcuuauauuuuuggaagau

SEQ ID NO: 4203757 - RNA, 57 nt, Human herpesvirus 3
guggguuaacgcucuuaacacgguugccucgguggccguuccuugacguugacccgc

SEQ ID NO: 4203758 - RNA, 64 nt, Human herpesvirus 3
aaguggagaaacagggaucgaccagaauaccgucguaaucuacgauucagacguuuuuucucuu

SEQ ID NO: 4203759 - RNA, 74 nt, Human herpesvirus 3
acguuauaaccuccgaaccguuccaugcgucuuguauaacgcacagacucugauggaauuguuccaauuaacgu

SEQ ID NO: 4203760 - RNA, 114 nt, Human herpesvirus 3
cccgguuucucccgcgugagccguucguaacauggccgcaucgcuugagcauagugguggauaugcuucuugaaaaaggccacacggauccugugucauuucgguagaaccggg

SEQ ID NO: 4203761 - RNA, 56 nt, Human herpesvirus 3
cgccugugaaauaacggucgcguguacgaaaaccgcagccuuuucuggucgaggcg

SEQ ID NO: 4203762 - RNA, 75 nt, Human herpesvirus 3
gcaacucagcagaugaugcuggaguccggacagcuggguguacaucuggcggcuauuggguaucacugucauugu

SEQ ID NO: 4203763 - RNA, 107 nt, Human herpesvirus 3
gccauaucucccauuaacucuuguagugugagcaaugcaucaccaucaacgguuaggugugcauuauggaaguaaacguuaagagaguucggaacgaguuggugugc

SEQ ID NO: 4203764 - RNA, 80 nt, Human herpesvirus 3
gcccggccgcauguugcucgaagagcacauaaccucuuaacaccguacagaggggauggcgucggugcaugugaguuggc

SEQ ID NO: 4203765 - RNA, 86 nt, Human herpesvirus 3
ggcuauggaaccuaauuuaauagggcuaugucccgccggauggcaugcucggauacuuggcucuguauuaaaucgacuccucagcc

SEQ ID NO: 4203766 - RNA, 61 nt, Human herpesvirus 3
ggguggguuaacgcucuuaacacgguugccucgguggccguuccuugacguugacccgcuu

SEQ ID NO: 4203767 - RNA, 61 nt, Human herpesvirus 3
gucugacgugguaagugcggcuucaccagagucuucugucaaguugcauguuaacgucgac

SEQ ID NO: 4203768 - RNA, 65 nt, Human herpesvirus 3
gugucguguauaucuguccauggaguuugccugaaacacucccauuggcaugauaaacguaauau

SEQ ID NO: 4203769 - RNA, 58 nt, Human herpesvirus 3
guuucguauuuaacuguucccaugucaugaucucggcuuugggaauaauugugcaaac

SEQ ID NO: 4203770 - RNA, 64 nt, Human herpesvirus 3
ucggguaacgcagguuuaaugucacuuugcauuugaacagacguguuuggacuuccguucucgg

SEQ ID NO: 4203771 - RNA, 57 nt, Human herpesvirus 3
ugcagucguauggaaacgcggcucauaagguuuucggaguguuuacgugcgauggua

SEQ ID NO: 4203772 - RNA, 84 nt, Human herpesvirus 3
ugcauuaacauuccaaguccccguucauauugcaacauaacacugucauguauugauaccacggcggcuauggguagggaugua

SEQ ID NO: 4203773 - RNA, 66 nt, Human herpesvirus 3
uguauguuggagauagagcguacuccgcguucgagugugcgguauuauguuuauauuuaauguaua

SEQ ID NO: 4203774 - RNA, 59 nt, Human herpesvirus 3
uuaccgucugguaucucauucggggacaaucguuuugaagacagggauacggaggguaa

SEQ ID NO: 4203775 - RNA, 55 nt, Human herpesvirus 3
uuagaccguuuguuaaccggagccguuauucguauuacggugcaugaggguuuaa

SEQ ID NO: 4203776 - RNA, 85 nt, Human herpesvirus 3
cacgucuaaagguguuuguugcugggugucaccguuagauuuaagugcggucaggcgggcguaggcuagcgacguaccuugcgug

SEQ ID NO: 4203777 - RNA, 55 nt, Human herpesvirus 3
ccgguacuccgggucgaggguguguacacucacgcauuuaccugguguaccacgg

SEQ ID NO: 4203778 - RNA, 84 nt, Human herpesvirus 3
cgacaccgggggaauuaucgggguucuggaucgcggcagggaaaaugauuucugucucuggcgccccgguucccccgcaagacg

SEQ ID NO: 4203779 - RNA, 63 nt, Human herpesvirus 3
gaaccgggcgcgguaguaacagagaauuucuucauaguuacaaaacuaccaugucaucguuuc

SEQ ID NO: 4203780 - RNA, 102 nt, Human herpesvirus 3
gaguaguguccaaauggcauugucgcccugaccacgagucuccgauucuauuguuaauagaauacguuuaaugucgucuuggguuaauuuggaugcuaacuc

SEQ ID NO: 4203781 - RNA, 59 nt, Human herpesvirus 3
gcuaugaucgucuaccacgcgaccaguuucaugcucguggggggcgguaugaucaaggc

SEQ ID NO: 4203782 - RNA, 64 nt, Human herpesvirus 3
ggcuguguuguuguuuccaaacggaacugugguaacgcuucuaggauucgaacgacgacaagcc

SEQ ID NO: 4203783 - RNA, 98 nt, Human herpesvirus 3
ggugcgcguaaaguaaacgggugauuuucuuccacugacaccucaaugagucuuuggccuugggguuuuggauuaagaucuccuuuaaacacgucacc

SEQ ID NO: 4203784 - RNA, 78 nt, Human herpesvirus 3
guccagccguguuacugguaauggcggcaguuauuuacgcuauggacuguuugguggacacgguauccuuuauugggc

SEQ ID NO: 4203785 - RNA, 82 nt, Human herpesvirus 3
gucucggugggaagcguuuaauuguuaugccguuauugaagauuuaacgcguaguuauguuaacgcguuacccagugaugau

SEQ ID NO: 4203786 - RNA, 77 nt, Human herpesvirus 3
uacaccuucucguuggcgucgcuguguauauacaaaaaccaagaacacaugcuucaguccguccgcggaaagaugua

SEQ ID NO: 4203787 - RNA, 81 nt, Human herpesvirus 3
uggagaggccuuauugcagacauuuguuucgaugcaaaauggguuuggggcacgaaacguguuuuuagcuaagguuuccca

SEQ ID NO: 4203788 - RNA, 56 nt, Human herpesvirus 3
uuggaacaauuccaucagagucugugcguuauacaagacgcauggaacgguucgga

SEQ ID NO: 4203789 - RNA, 77 nt, Human herpesvirus 3
cgaggcuuuggagacggcgguaaaggcuuuaucugaaaagaccgacagccuaacaucgccgguuuuacaaaguaccg

SEQ ID NO: 4203790 - RNA, 71 nt, Human herpesvirus 3
cgggggaauuaucgggguucuggaucgcggcagggaaaaugauuucugucucuggcgccccgguucccccg

SEQ ID NO: 4203791 - RNA, 59 nt, Human herpesvirus 3
gccguguuacugguaauggcggcaguuauuuacgcuauggacuguuugguggacacggu

SEQ ID NO: 4203792 - RNA, 108 nt, Human herpesvirus 3
guaccaugaguaaauuucgaaaugucauauacuguguuuuuauccauauaggcaaauguguaaauugaucgaaaucacguaauaacauacgaagaacgucauggucac

SEQ ID NO: 4203793 - RNA, 63 nt, Human herpesvirus 3
gucgccaagauuugcgguaaugcgaggauuuuuaguacucguaauucgaaugcagguggugac

SEQ ID NO: 4203794 - RNA, 55 nt, Human herpesvirus 3
gucggcgcgcugcugaugugguuacggaagacguaaaagcagaugaugugccgau

SEQ ID NO: 4203795 - RNA, 86 nt, Human herpesvirus 3
guuugccccccgacgaacguccagggacgcgagguguuauaccccgggcaucauguuuccuugggcggguaucaucggucucaaac

SEQ ID NO: 4203796 - RNA, 59 nt, Human herpesvirus 3
uucagaauaauccaggguuccugcaggguccacuggaggagccacacaauauucgcgaa

SEQ ID NO: 4203797 - RNA, 66 nt, Human herpesvirus 3
uugccuacccucuuauuggaaauauagauauuacguuuaucaugccaaugggaguguuucaggcaa

SEQ ID NO: 4203798 - RNA, 59 nt, Human herpesvirus 4 [Epstein-Barr virus]
ccuggagcguucucagggaucgcugguuuuuaaauaccaacgccgccaagacuuccagg

SEQ ID NO: 4203799 - RNA, 55 nt, Human herpesvirus 4 [Epstein-Barr virus]
cggggcaguauuuucgaccgagguccucgauguagauggccaggcgacugcuccg

SEQ ID NO: 4203800 - RNA, 84 nt, Human herpesvirus 4 [Epstein-Barr virus]
gcuuccuucgugguaaauggcagaggcgguaccgaagaaucuaugauuugauagaacuguguggcucucugcaccacaucuggc

SEQ ID NO: 4203801 - RNA, 58 nt, Human herpesvirus 4 [Epstein-Barr virus]
ugaguagagcuggguagaccugucguuguauugggaucagcaaauccaguuguauuca

SEQ ID NO: 4203802 - RNA, 71 nt, Human herpesvirus 4 [Epstein-Barr virus]
gccucugggguccaggagucugcugcggcuaugcagcccauaccuauagauccugggccccccggaggggc

SEQ ID NO: 4203803 - RNA, 64 nt, Human herpesvirus 4 [Epstein-Barr virus]
gcuguacauccagcugcuguaugccugguaacccauaggccauccggcggccaggguuugcagu

SEQ ID NO: 4203804 - RNA, 84 nt, Human herpesvirus 4 [Epstein-Barr virus]
ggaggccccgcggcaggaggccccgcggcaggaggccccgcggcaggaggccccgcggcaggaggccccgcggcaggaggcccc

SEQ ID NO: 4203805 - RNA, 69 nt, Human herpesvirus 4 [Epstein-Barr virus]
ggcaagagcuccaaagccaggcucgagaagucauagucauccucggccacacggccggagcuccgggcc

SEQ ID NO: 4203806 - RNA, 64 nt, Human herpesvirus 4 [Epstein-Barr virus]
ggcgucaggagacacggcucugucaguuaucaccguaccaugagugccauguguguccagugcc

SEQ ID NO: 4203807 - RNA, 61 nt, Human herpesvirus 4 [Epstein-Barr virus]
ggggagcucuuccgcuucaucugggcccacuacgugaggcccacgguggcggcagaccccc

SEQ ID NO: 4203808 - RNA, 97 nt, Human herpesvirus 4 [Epstein-Barr virus]
ggugaucgguguagcuguacauccagcugcuguaugccugguaacccauaggccauccggcggccaggguuugcagucuccauuuggccugaucucu

SEQ ID NO: 4203809 - RNA, 68 nt, Human herpesvirus 4 [Epstein-Barr virus]
guggugcagagagccacacaguucuaucaaaucauagauucuucgguaccgccucugccauuuaccac

SEQ ID NO: 4203810 - RNA, 62 nt, Human herpesvirus 4 [Epstein-Barr virus]
ucaccguuccucauuuugugugccuccucaaauguuccagaagucggccacaggggaggugg

SEQ ID NO: 4203811 - RNA, 71 nt, Human herpesvirus 4 [Epstein-Barr virus]
ucggugggaggcauaggccccacuccccuccuuucccugguauauuccgugggugccugugucaccgcuga

SEQ ID NO: 4203812 - RNA, 78 nt, Human herpesvirus 4 [Epstein-Barr virus]
uguuauuucauggucuuuuuacaaacucauauauuugcugagguuuugaaggaugcgauuaaggaccuuguuaugaca

SEQ ID NO: 4203813 - RNA, 61 nt, Human herpesvirus 4 [Epstein-Barr virus]
aggaugggcaggacaaggcccugguggacuaccugucggccugcacguccugccacgcccu

SEQ ID NO: 4203814 - RNA, 129 nt, Human herpesvirus 4 [Epstein-Barr virus]
caaaacaacgugugcucuuucuucauacaggcccgcaauuuccaugacagucccguugguggucagcagcagauagugaacguggagguugucaaaaucaaaguaguuggagcucaagauggaguuuug

SEQ ID NO: 4203815 - RNA, 126 nt, Human herpesvirus 4 [Epstein-Barr virus]
ccuucuggauccaggaauguugucuucaauuaauguagaccagccgcccuguugaugaauccaaccauccaggccuucgcuggcuucuaacaucccacgaacugacagguccacaacauaguaagg

SEQ ID NO: 4203816 - RNA, 129 nt, Human herpesvirus 4 [Epstein-Barr virus]
cgcacgcuggagcaugccaagaucugccagcuccugaacacggccccucucaaggccaucgugggccacggggggcgagacauguacaaggacauccuggcccaucuggagcagaacucacagcgcaag

SEQ ID NO: 4203817 - RNA, 84 nt, Human herpesvirus 4 [Epstein-Barr virus]
cuucaguuugugcuuguggaccucucagaguuucaggacgauuuaccuggaugcuggacggagauuuacaugcaggcauugaag

SEQ ID NO: 4203818 - RNA, 89 nt, Human herpesvirus 4 [Epstein-Barr virus]
gcagacguuaguaacauuuguauugugaggaaaggccuuuagauauagaggcucucccaacacaauagaauuuuugcagcuaaguuuuc

SEQ ID NO: 4203819 - RNA, 91 nt, Human herpesvirus 4 [Epstein-Barr virus]
aaggaugaccagguucccagcagcaggcgcagcgacuggcgcaacaccgucucugggccgugcugcaccucaaacauuugaucuggaccuu

SEQ ID NO: 4203820 - RNA, 76 nt, Human herpesvirus 4 [Epstein-Barr virus]
agcaccaucagcccggggggacacggagccugaccaugcaaaaaguaagccugcgcgugaccccccgccuggugcu

SEQ ID NO: 4203821 - RNA, 70 nt, Human herpesvirus 4 [Epstein-Barr virus]
cagcgagggucuccugcuacuggaccugaaccugggagucucugggacgccccuggcagacgcccuccug

SEQ ID NO: 4203822 - RNA, 74 nt, Human herpesvirus 4 [Epstein-Barr virus]
cgaguucauccugggcuuuguggcaccaaccuccgcccauccuucagaggagccacuagcacaggugagaagcg

SEQ ID NO: 4203823 - RNA, 57 nt, Human herpesvirus 4 [Epstein-Barr virus]
gaggucucugaugagcuggaagaaggcguagagcauguccagcuccgaugggaacuc

SEQ ID NO: 4203824 - RNA, 116 nt, Human herpesvirus 4 [Epstein-Barr virus]
ggaggagggggcugccacccccgggccguggaaugagggccugagucucuuuaagcugcacaaggagcugaagcgcgccccauccgaagcccgggaccucaugcagagccucuuuc

SEQ ID NO: 4203825 - RNA, 67 nt, Human herpesvirus 4 [Epstein-Barr virus]
ggauuggaagaaaugacgcuggagaagcugcacauuuuuaagcaaaaagccagcguguuucuuaucc

SEQ ID NO: 4203826 - RNA, 65 nt, Human herpesvirus 4 [Epstein-Barr virus]
gucgcugcgccugcugcugggaaccuggucauccuuugccagcgagcaguacgagugccugcgac

SEQ ID NO: 4203827 - RNA, 60 nt, Human herpesvirus 4 [Epstein-Barr virus]
uaggcauagagagugaugagcccgcuucgacagagccgguucaugaucagcuacugccug

SEQ ID NO: 4203828 - RNA, 66 nt, Human herpesvirus 4 [Epstein-Barr virus]
uauuugcggcugggcuaaugauguccgccaagaacaagccccuggacgaagcccugcucacgaaug

SEQ ID NO: 4203829 - RNA, 61 nt, Human herpesvirus 4 [Epstein-Barr virus]
ucccccgccuccagcaccgggacucguacgccgagcucgaguacgacugugaggugggcga

SEQ ID NO: 4203830 - RNA, 56 nt, Human herpesvirus 4 [Epstein-Barr virus]
uggagcuccuuggugcaggagaauuggcucuaacuaugcggucuaagaagcuucca

SEQ ID NO: 4203831 - RNA, 97 nt, Human herpesvirus 4 [Epstein-Barr virus]
uuugccucccuggagcuguacucacgggacgaacagcgugccuccaacgucuuugaccuggagggcaucuuccgggaguacaacuuccaggcgcaaa

SEQ ID NO: 4203832 - RNA, 85 nt, Human herpesvirus 4 [Epstein-Barr virus]
agcggcgcguggcauccacguuggccucaaagauccgacacccgugcuugucuugcagccacguggccacgugacacacacuguu

SEQ ID NO: 4203833 - RNA, 58 nt, Human herpesvirus 4 [Epstein-Barr virus]
aggagauuggugugaaaggagaaaaucugcuucuccccgacuuauggcuagauuuccu

SEQ ID NO: 4203834 - RNA, 67 nt, Human herpesvirus 4 [Epstein-Barr virus]
caugucagcuccacgcaaagucagauugccuucuguuaaggcuguugacaugagcauggaagacaug

SEQ ID NO: 4203835 - RNA, 96 nt, Human herpesvirus 4 [Epstein-Barr virus]
ccgagacgaaggcccgucuguagaggaagugguugcgcaugcgggccagcucccaguagaccacguccccccagacgcgcaggcacagggucucgg

SEQ ID NO: 4203836 - RNA, 64 nt, Human herpesvirus 4 [Epstein-Barr virus]
ccuggacacuggacccaggcggcgcaugaggcgcaguaccucacgccgcacgguccggcacagg

SEQ ID NO: 4203837 - RNA, 84 nt, Human herpesvirus 4 [Epstein-Barr virus]
gaacugccagcguccugaggcugcugcuuuccucggaugccaaagaagacguugagaugcguguagcccagaagcguguaguuc

SEQ ID NO: 4203838 - RNA, 58 nt, Human herpesvirus 4 [Epstein-Barr virus]
gagcuccaaagccaggcucgagaagucauagucauccucggccacacggccggagcuc

SEQ ID NO: 4203839 - RNA, 87 nt, Human herpesvirus 4 [Epstein-Barr virus]
gcgaggccccgcggcaggaggccccgcggcaggaggccccgcggcaggaggccccgcggcaggaggccccgcggcaggaggccccgc

SEQ ID NO: 4203840 - RNA, 80 nt, Human herpesvirus 4 [Epstein-Barr virus]
gcuauaaguugcuggcaaagugcugagagcaaggcaccaauuuuggcaagccuuccuuggggucguguugguggaauagc

SEQ ID NO: 4203841 - RNA, 62 nt, Human herpesvirus 4 [Epstein-Barr virus]
ggaagaaaugacgcuggagaagcugcacauuuuuaagcaaaaagccagcguguuucuuaucc

SEQ ID NO: 4203842 - RNA, 65 nt, Human herpesvirus 4 [Epstein-Barr virus]
ggagacacggcucugucaguuaucaccguaccaugagugccauguguguccagugccuaaucacc

SEQ ID NO: 4203843 - RNA, 128 nt, Human herpesvirus 4 [Epstein-Barr virus]
gucugggaggcagagggucggccuaggcccggggaaguggagggggaucgcccgggucucuguuggcagaguccgggcgauccucugagacccuccgggcccggacggucgcccucagccccccagac

SEQ ID NO: 4203844 - RNA, 91 nt, Human herpesvirus 4 [Epstein-Barr virus]
ugauaacucuaugaggacauuuucccaaucucccgccgauaccuguuccugcacaaccgagguagaugggacuucuucuuccauguuguca

SEQ ID NO: 4203845 - RNA, 57 nt, Human herpesvirus 5
accagccguagccaaucccgaugacuuuccagcgcgugggauuguugccggccaggu

SEQ ID NO: 4203846 - RNA, 57 nt, Human herpesvirus 5
acgcaggagcgucugacuagcaagcucaucgaugucaaucuaguggggcccuugugu

SEQ ID NO: 4203847 - RNA, 57 nt, Human herpesvirus 5
acgucgcgagaccugguguuugaccagcagggggaagacgcagugguccgucggugu

SEQ ID NO: 4203848 - RNA, 84 nt, Human herpesvirus 5
augcgcgcucguuaaucugaacgaaggccgcgucaacuacgccucccugcuagccuucagccaucaucccgaguuccccagcau

SEQ ID NO: 4203849 - RNA, 69 nt, Human herpesvirus 5
auuuucgccgcuucucguaaaaccuucugcuccguaacgaccggagucguuuaacgugagguugaagau

SEQ ID NO: 4203850 - RNA, 60 nt, Human herpesvirus 5
cagcucgucgcgcgcguagcucaccaccuuguccuggugcucgcaguaguggcgcagcug

SEQ ID NO: 4203851 - RNA, 75 nt, Human herpesvirus 5
ccacgcacguugaaaacaccuggaaagaacgugcccgagcgaacguccucuuuccaggugucuucaacgacgugg

SEQ ID NO: 4203852 - RNA, 64 nt, Human herpesvirus 5
ccacggccagcgccuugucgcggcccaugagguagaagggcuguucgaugugguucuggucggg

SEQ ID NO: 4203853 - RNA, 63 nt, Human herpesvirus 5
ccagcugguugaagagcgcgcacacgcgcgacacagccgucugcagcucgucggccggcgugg

SEQ ID NO: 4203854 - RNA, 99 nt, Human herpesvirus 5
ccauggucgccgcuggcggcgccgcugccgggccucggccgccgccgccacccauggcggcggggucguggcggcugugucguugugaggccuguaugg

SEQ ID NO: 4203855 - RNA, 70 nt, Human herpesvirus 5
ccgcccgugcccgucuacgcgguccacggucugcacacguuaaugcgcgagacggcguuggacgcggcgg

SEQ ID NO: 4203856 - RNA, 129 nt, Human herpesvirus 5
ccucucgccguucccgucgacugcaaaaccgccagcccucggaggcgugcucguaucccggcaaguugcgcggugggggcgugccccgcagaccccgguuaaugcgguggugguaggcccgcgagaagg

SEQ ID NO: 4203857 - RNA, 57 nt, Human herpesvirus 5
cgacgaagaugcgucgaaucgccgccgugauggugcgguucgccgucaucguugucg

SEQ ID NO: 4203858 - RNA, 59 nt, Human herpesvirus 5
cgacgcagaaccacgcgcaguuuccucacguguuaggugcuaguccgcgguucucgucg

SEQ ID NO: 4203859 - RNA, 129 nt, Human herpesvirus 5
cgaugguggcucuacaguggguggugguggcucacguuuggaugugcucggaccgugacgguggguuucgucgcgcccacgguccgggcacaaucaaccgugguccgcucugagccggcuccgccgucg

SEQ ID NO: 4203860 - RNA, 75 nt, Human herpesvirus 5
cgcaccgcccauggguuccugcugaaaacgacacucgagcagucguugcauggcggguuccgagggcgguccgcg

SEQ ID NO: 4203861 - RNA, 68 nt, Human herpesvirus 5
cgccgcugccuacgcgaucggcggccgucagcuccugcugcgugucgaugcgcuggugccaggcggug

SEQ ID NO: 4203862 - RNA, 95 nt, Human herpesvirus 5
cgccuggcgcuccaccggaaucugagacagcaacaggcgcuccgggccgugccaaaaguugcuauuguugccgcuacucggaggggcgcccggcg

SEQ ID NO: 4203863 - RNA, 85 nt, Human herpesvirus 5
cgcgcucccacgcguccucccgcccaggaccuguguagccauaaccugucaaucauccuguacgaagaggaaucucagagcagcg

SEQ ID NO: 4203864 - RNA, 71 nt, Human herpesvirus 5
cggaggaacacggcaguuagagacuggagugguggaaucauucuccuccuccgacugcgguggugccuccg

SEQ ID NO: 4203865 - RNA, 58 nt, Human herpesvirus 5
cggcacaugagcucuuucgucaguuccgauaucgacggcgaccagaagcccggugccg

SEQ ID NO: 4203866 - RNA, 122 nt, Human herpesvirus 5
cgggcguuggacgcuuaucgggcgcgcaucgccgucgaguacgugcugauucgcgccgugcgcgacgagaucuacgcuguacuacgacgggacggcggcgcguugccacagcguuucgccug

SEQ ID NO: 4203867 - RNA, 70 nt, Human herpesvirus 5
cgucguuuuuugugcuggaacuucccucgucccgacaaauguagcggaaaucuucaagcaaaucgcgacg

SEQ ID NO: 4203868 - RNA, 56 nt, Human herpesvirus 5
cguggaugagaucguagagggcgcgugguuuaagcacaccuuugcgggcauguacg

SEQ ID NO: 4203869 - RNA, 121 nt, Human herpesvirus 5
cugcaggaaacguuggcgacggaauacuuugcgcuguuacacggaauccagaccuucagcuacgggcuggacuuucggucgcaguuggaaaagauccgcgaucugcggacucguuuugcgg

SEQ ID NO: 4203870 - RNA, 58 nt, Human herpesvirus 5
gaaagccgugcugggccucaacgcggcuugugccguguacgaucaccggcuggcuuuc

SEQ ID NO: 4203871 - RNA, 62 nt, Human herpesvirus 5
gacacaacaccguaaagccguugcgcucgugggggcgcaugaaggguugcggguugcggguc

SEQ ID NO: 4203872 - RNA, 121 nt, Human herpesvirus 5
gaccgcugcgugcguccaccaccagcgaacgcacgaucucgggccaguagcagagguggacucggauagagaccucuggccagucgugcgcggggaagaugcaggccaccuccagacgguc

SEQ ID NO: 4203873 - RNA, 65 nt, Human herpesvirus 5
gacgacgugguuuuugcuuccgagcuguguuuuuauugcagcggucguuuuaaccgcaggucguc

SEQ ID NO: 4203874 - RNA, 127 nt, Human herpesvirus 5
gagcaauuuauagauucugaagugcuuuuauugcugauaacuguuguacuguauguugauguggcugucucaguacuaguggaauaguuaacgguaguacuacagggacauugacaggaacagguuu

SEQ ID NO: 4203875 - RNA, 73 nt, Human herpesvirus 5
gaggccaguaggguugcggcgucuugcgacuaagcacggcgugguccgagacacccagguuguucaugguuuc

SEQ ID NO: 4203876 - RNA, 62 nt, Human herpesvirus 5
gaggcgcugaucugcagcugcacggccguggagucgugcagccgcaugagacgugauaccuc

SEQ ID NO: 4203877 - RNA, 70 nt, Human herpesvirus 5
gaguacccauuacgugugucaugucgguuucguuuauuggaaaaagguugggagaugcgggguggugcuc

SEQ ID NO: 4203878 - RNA, 83 nt, Human herpesvirus 5
gaugcacugcgagggccagcccagcgacacgcacgagcccucgaagcgccgcaaguaacgccgcaggcccucauagucgcguc

SEQ ID NO: 4203879 - RNA, 79 nt, Human herpesvirus 5
gauuccaagucagagcagcgucggucaugacgcggcgaaacgccguugaccuggaccgaccgccgcuuuggucgggauc

SEQ ID NO: 4203880 - RNA, 108 nt, Human herpesvirus 5
gcaauaccuccuagaucacaacucccuagccagcgugccguguacguuacucacugccuguuucuacguggcuauguuugccaguuuguguuuuaucacggagauugc

SEQ ID NO: 4203881 - RNA, 61 nt, Human herpesvirus 5
gcacuugcgcguuaaguugcaauuuuccacgcacgaaauaacgguacagagcgcgaagugc

SEQ ID NO: 4203882 - RNA, 71 nt, Human herpesvirus 5
gcagaaacucgcgugccgacggggucucgcguucaccgcgaaacuccacgcccggcaccgggugugacugc

SEQ ID NO: 4203883 - RNA, 55 nt, Human herpesvirus 5
gcagggcgcuuuggcaaaaggcgcaguuuucuagugaaauguugagcgccgcugu

SEQ ID NO: 4203884 - RNA, 59 nt, Human herpesvirus 5
gcccaccggcagauagguaaagcggugggugguaaaaaccgcuuuggcuacgguggugu

SEQ ID NO: 4203885 - RNA, 66 nt, Human herpesvirus 5
gcccccaaaacugucagcggcgcucagacgucaugugcgacgccucgggcgccugugacaugaggc

SEQ ID NO: 4203886 - RNA, 82 nt, Human herpesvirus 5
gccuucccaugcgggaacuggccuggcggcggguagccgacgacucgcacgaccuaugguguugcuguauggacuggaaggc

SEQ ID NO: 4203887 - RNA, 59 nt, Human herpesvirus 5
gcgacggucuuuuuugccugggcugcgucacuucgcccagguuucuggagauuguacgc

SEQ ID NO: 4203888 - RNA, 65 nt, Human herpesvirus 5
gcgccggcagcugcagcacguggagacgcugcgucgguuucugcgcggcgacagcugcuuugugc

SEQ ID NO: 4203889 - RNA, 63 nt, Human herpesvirus 5
gcgccuggacguugcacgcggcggguaccgaaagcggcgcuaacgcggcaacggccacggcgc

SEQ ID NO: 4203890 - RNA, 55 nt, Human herpesvirus 5
gcgcgcgugugcgaucgcgugcuggaagaccacuugcauacgccgcgacgcgugc

SEQ ID NO: 4203891 - RNA, 110 nt, Human herpesvirus 5
gcgguccacaucccauucgccgucgcaacagcagcucucggugcugggcgcuuccaucgcgcuggaggaccugcugcccaugcgacuggcguccccggagacggaaccgc

SEQ ID NO: 4203892 - RNA, 55 nt, Human herpesvirus 5
gcucgucuuuuuagccgugaccaucuacuaccugguaugcuggaucaagaucagc

SEQ ID NO: 4203893 - RNA, 83 nt, Human herpesvirus 5
gcuggaagccguguaccgcgagauccucuuucguuucguggcucgccgcaacgacguggacuuuugguuacugcgcuuccagc

SEQ ID NO: 4203894 - RNA, 85 nt, Human herpesvirus 5
ggaaacuguggacgcuguuuccgaauaccgggaggagaucgugcuucccucuuccaaggaucggaaaguagcguccgucguuucc

SEQ ID NO: 4203895 - RNA, 59 nt, Human herpesvirus 5
ggaaagggcgcguucucgcccuugaggcugacgguucccaggccgagaacgcgcauucc

SEQ ID NO: 4203896 - RNA, 59 nt, Human herpesvirus 5
ggaaugcgcguucucggccugggaaccgucagccucaagggcgagaacgcgcccuuucc

SEQ ID NO: 4203897 - RNA, 65 nt, Human herpesvirus 5
ggcgcuggcggcggcgcugaucaccaccugcggggcagcccgggcgauucgccgccgccgauacc

SEQ ID NO: 4203898 - RNA, 68 nt, Human herpesvirus 5
ggcgucuguaaugauacaaaguggcggcauacgacgcauguaucugcuguagauaucauaacgcugcc

SEQ ID NO: 4203899 - RNA, 124 nt, Human herpesvirus 5
ggcugguaaggucgaucaugggcggcguggugaccguggcgguggcgggcaugacgggguuugcggcgacgggcacuccggccacagcggcggccgcggcggccacggcggcacuugccgagcc

SEQ ID NO: 4203900 - RNA, 67 nt, Human herpesvirus 5
gggcaacgcguugcgaacggugucguuaagcuuaacuuugcuuuccaccgugguguaaccgcgaucc

SEQ ID NO: 4203901 - RNA, 57 nt, Human herpesvirus 5
gggccgcgcccagguaggccguuacugucugcaggacgccguauuggugcgcgaucu

SEQ ID NO: 4203902 - RNA, 79 nt, Human herpesvirus 5
gggcgaccgucucuaccaacgcuuccugcgcgaauggcuggugugucggcaagccgagcgggaggcggugacggcgcuc

SEQ ID NO: 4203903 - RNA, 102 nt, Human herpesvirus 5
gggcucgaccggcggcugcuguugcacgggcucgggugacggcgacaucacggucacuucauccuccucgucgcccucuuccagcagccgcuggucgaaccu

SEQ ID NO: 4203904 - RNA, 65 nt, Human herpesvirus 5
ggugccccucuuucugcgucguggcuaucacggaaguggaggcggacgagguagagguuuguacc

SEQ ID NO: 4203905 - RNA, 72 nt, Human herpesvirus 5
gguggguucaugcugccuaucuacgagacggccgcgaaggccuacgccguggggcaguuugagcagcccacc

SEQ ID NO: 4203906 - RNA, 60 nt, Human herpesvirus 5
guacgccaccgauccgcacgaccgcgacgaggucgcgcguacggacgaguggaagggugc

SEQ ID NO: 4203907 - RNA, 82 nt, Human herpesvirus 5
guagagcagcauguccaccucgaaggugucggugcguacggccgugagugcgaaucccggguggaugugcgccuuggucugc

SEQ ID NO: 4203908 - RNA, 108 nt, Human herpesvirus 5
gucgcgcucggugcagaaaacgaagagguugcuguugcggcgcgagcagccgccgggcggcacgggcaagugcuucagcagcagcuucuucuugccuucggcgcguac

SEQ ID NO: 4203909 - RNA, 95 nt, Human herpesvirus 5
gugaucgcuccuuuguuggcggggcucacgguggaggcggauuucggcgucucugugcgcacgccugugcuuuguuacgacggcggggugcucac

SEQ ID NO: 4203910 - RNA, 57 nt, Human herpesvirus 5
gugcaacagcccgugucgcgcaaaaucguccaaacugugcgccagguaguaaagcac

SEQ ID NO: 4203911 - RNA, 90 nt, Human herpesvirus 5
gugcggggaggauugacgugugcggugcuuguggaacacgguguuuuaauauguauccgcguguaaugcacgcggugugcuuucuggcac

SEQ ID NO: 4203912 - RNA, 97 nt, Human herpesvirus 5
gugcuugccgcgcagcugcgccuccagccgcuccgagcgcaccuucuugaagacgcguaccucgggcgcguuggcuacgcgcacggcgcccaggcgc

SEQ ID NO: 4203913 - RNA, 66 nt, Human herpesvirus 5
gugugaccugucguuaucgcggcgaaugcgugccucugcgcacuccgggcgagaugacacguccgc

SEQ ID NO: 4203914 - RNA, 66 nt, Human herpesvirus 5
guguuugagccgcagauccgagagccucaccugcgugacggcgucuucggucucgagcaaaaacac

SEQ ID NO: 4203915 - RNA, 71 nt, Human herpesvirus 5
guuacaaguauguggaacagcucguggaccucacguugaacuaccacuacgaugcgagccacggcuuggac

SEQ ID NO: 4203916 - RNA, 55 nt, Human herpesvirus 5
uaaaaauaaagagacgggaggcugaucgcggccuucagcgucucauuugucuuua

SEQ ID NO: 4203917 - RNA, 96 nt, Human herpesvirus 5
aaagaggcucaacgagcaccaaaggcuaagucggaaaacucgcgcccgcuuccccggacgguuucggcuuagccucuggccugcgaugguuuuuuu

SEQ ID NO: 4203918 - RNA, 129 nt, Human herpesvirus 5
aaauucuuucaccaggaucccaaccgcguucuggacugcauccguccgguggugccgcgcucuacuucguaccacgagacggguguauaccagaugugggucucgggcgccaccaagaaagaccuguuu

SEQ ID NO: 4203919 - RNA, 66 nt, Human herpesvirus 5
aaguaugaaaguuggcugcgcccguuggugaauguuaccagacgcgauggcccgcuaucgcaacuu

SEQ ID NO: 4203920 - RNA, 67 nt, Human herpesvirus 5
accgcccucggaacccgccaugcaacgacugcucgagugucguuuucagcaggaacccaugggcggu

SEQ ID NO: 4203921 - RNA, 108 nt, Human herpesvirus 5
acuuggaaauccccgugagucaaaccgcuauccacgcccauugauguacugccaaaaccgcaucaccaugguaauagcgaugacuaauacguagauguacugccaagu

SEQ ID NO: 4203922 - RNA, 104 nt, Human herpesvirus 5
agagguacacgaugcccugcucuuucacuacgaacacgggcuagggcggcuguugucagugacccugccgcgucaccguguguccacucugggcucgucccucu

SEQ ID NO: 4203923 - RNA, 70 nt, Human herpesvirus 5
aguccagugaccgguaaccacguccagccccugcguauguaccaguccaagcacguccggucauuguucu

SEQ ID NO: 4203924 - RNA, 84 nt, Human herpesvirus 5
agugcaggaacuguugcagcgcuugggucagacgcuaggcgaccuagaacugcaggaaacguuggcgacggaauacuuugcgcu

SEQ ID NO: 4203925 - RNA, 83 nt, Human herpesvirus 5
aguuucuggcgcagguggguggcgcgcgggucgcgcaacagcggaucgcgcaccauaaacucgccuacgaggcguugggagcu

SEQ ID NO: 4203926 - RNA, 56 nt, Human herpesvirus 5
caacggccgcucggcgcacugcgccagccagguagaagaagcaccggcggccgcug

SEQ ID NO: 4203927 - RNA, 111 nt, Human herpesvirus 5
caacgucagcgucauauugcgcagcaggccgcgcagucguacguagccgcgggugugaucuacgaacugguguaggcccagcugguagugcuugaugagauguagacguug

SEQ ID NO: 4203928 - RNA, 71 nt, Human herpesvirus 5
cacaacaggccggcgcgcacagccuccugucgauuacgaaucggcgucagguaggcgcgcaggaacuggug

SEQ ID NO: 4203929 - RNA, 122 nt, Human herpesvirus 5
cagaaguugcgccggacggcguuguggcgcgcaggggcuccgacguggcguuauaaugaagccggggcgccacuccuacgccacgcgauuggccgucggcguccgcagucgggcgaaaucug

SEQ ID NO: 4203930 - RNA, 56 nt, Human herpesvirus 5
cagcggccgccggugcuucuucuaccuggcuggcgcagugcgccgagcggccguug

SEQ ID NO: 4203931 - RNA, 79 nt, Human herpesvirus 5
cagcguccaacacgccguccuugacgacgcagcuggccugauagcuggacacguuguuaagcggcggaaagcgaaacug

SEQ ID NO: 4203932 - RNA, 78 nt, Human herpesvirus 5
cauagccugucuaacuagccuucccgugagaguuuaugaacauguaucucaccagaaugcuaguuuguagaggcuaug

SEQ ID NO: 4203933 - RNA, 68 nt, Human herpesvirus 5
ccaccacgcggccccgcaccggcgguguuuugggugugucggggcgcggccgggugggugugugccgg

SEQ ID NO: 4203934 - RNA, 75 nt, Human herpesvirus 5
ccacgucguugaagacaccuggaaagaggacguucgcucgggcacguucuuuccagguguuuucaacgugcgugg

SEQ ID NO: 4203935 - RNA, 57 nt, Human herpesvirus 5
ccacguucaaccccauguuuuucaauguaccgcguuggaacaccaaauuguacgugg

SEQ ID NO: 4203936 - RNA, 81 nt, Human herpesvirus 5
ccauguuguccaaggguaucaugcugcguggcgcucuaaaucucagccucugucgcuuagugcucuuugucgacgacgugg

SEQ ID NO: 4203937 - RNA, 79 nt, Human herpesvirus 5
ccgcaugggaaaguacggugucgccaccguugacgugggcggcgaugagaacgucagcgguggcgaaaccgccgugcgg

SEQ ID NO: 4203938 - RNA, 85 nt, Human herpesvirus 5
ccgggcucgcccacugacucggcgcgucacaugagcgaucuggcuagccuggcgcucacggccgaguucggccugggcugucugg

SEQ ID NO: 4203939 - RNA, 74 nt, Human herpesvirus 5
ccggguccggaugcuucuuuauauaguauuggcugagcacguacugcugaaugagcaucugaaaguaauacugg

SEQ ID NO: 4203940 - RNA, 77 nt, Human herpesvirus 5
ccuggaggagccguagcggcgggaaccgcagcacucagagggugcgacauggacgccgccucugccggcuccgaggg

SEQ ID NO: 4203941 - RNA, 94 nt, Human herpesvirus 5
cgagaaagucgcagaaggucuccacgaacguguccucggugaagcgaaugcgcuucagaucguggacguguuugcgaaaccgcgacaguucucg

SEQ ID NO: 4203942 - RNA, 55 nt, Human herpesvirus 5
cgaggccgacagccuggagauguugcuggacaaguucuccacggaucaggccucg

SEQ ID NO: 4203943 - RNA, 55 nt, Human herpesvirus 5
cgcagaacaccgugcucaucacggaccagagccgcgaagaguucgauauuuugcg

SEQ ID NO: 4203944 - RNA, 57 nt, Human herpesvirus 5
cgccgcccaugugccgcguuccguacaacgaaugcggcgucgaauuaccgggcggcg

SEQ ID NO: 4203945 - RNA, 107 nt, Human herpesvirus 5
cgccgucgucgacgucgccgucgucacuucuuucgcucccucgacccagcagcgcccacagcgcgggcgagacggugcaggaguccgaggcggcggcgacggcggcg

SEQ ID NO: 4203946 - RNA, 55 nt, Human herpesvirus 5
cgcgacggccucgcugacuggaacgucguacgcugccgcggcacaggcuuucgcg

SEQ ID NO: 4203947 - RNA, 55 nt, Human herpesvirus 5
cgcucgccgucguuggaguuugacgaugacgccaaucuccucucgcucggcggcg

SEQ ID NO: 4203948 - RNA, 80 nt, Human herpesvirus 5
cgcucggcuuggucuucacguccagcagcgguaccagucccaccguuacgcaccaauccacguagagaccauagucgucg

SEQ ID NO: 4203949 - RNA, 60 nt, Human herpesvirus 5
cgcugcgcacgcucucggucacggccaacagagccaggccgggaaagagcugcgacagcg

SEQ ID NO: 4203950 - RNA, 59 nt, Human herpesvirus 5
cgcuguuggagcugcucaucgaggacuuugauaucuacguggacagcuucccacagucg

SEQ ID NO: 4203951 - RNA, 87 nt, Human herpesvirus 5
cggaaacgacggacgcuacuuuccgauccuuggaagagggaagcacgaucuccucccgguauucggaaacagcguccacaguuuccg

SEQ ID NO: 4203952 - RNA, 71 nt, Human herpesvirus 5
cggaggcaccaccgcagucggaggaggagaaugauuccaccacuccagucucuaacugccguguuccuccg

SEQ ID NO: 4203953 - RNA, 98 nt, Human herpesvirus 5
cgguagccguuucaacagcggcgugaugauacggagcgcgaagagauugagugauaggcgcacgauggccaugcgcgucaguuguuggucaauuaccg

SEQ ID NO: 4203954 - RNA, 117 nt, Human herpesvirus 5
cguaggccgucaggugcgaggccgaacggugaaucuuggcguggcgcacgcagcgaccguaguugucgcgguccgcgucgcguagcgcuucgauccacgaggucaccacguccugcg

SEQ ID NO: 4203955 - RNA, 74 nt, Human herpesvirus 5
cgucgaugcguccgccguguuucucggcguacugcugcacccagacguggccgcuaaauauggcgacgcucaug

SEQ ID NO: 4203956 - RNA, 81 nt, Human herpesvirus 5
cugcugccgccagucguaacgauucacggagcaccagccgaacguggugauccgccgaucgaugaccaaacgcgucagcgg

SEQ ID NO: 4203957 - RNA, 92 nt, Human herpesvirus 5
cuggugcuaguagggacguuugugcugcuggucauauuuguagcgucgcugaagucgaugugaagcagcaacccgaacgcgaccaggaccag

SEQ ID NO: 4203958 - RNA, 130 nt, Human herpesvirus 5
gaaaugagcggucucaaccuggucauccgcacgccgggucgcaccgagguggagccguugcucaugcugggcuccaucgagggccugcgcgccugccggccuuuugaccacaugccggccgcggacuuuc

SEQ ID NO: 4203959 - RNA, 70 nt, Human herpesvirus 5
gaagagguugcuguugcggcgcgagcagccgccgggcggcacgggcaagugcuucagcagcagcuucuuc

SEQ ID NO: 4203960 - RNA, 80 nt, Human herpesvirus 5
gacaacuuuucagagccguguuuuuugcacaauuuuuuuaaucaggaagacuauguagugggaacgcgggagggggauuc

SEQ ID NO: 4203961 - RNA, 63 nt, Human herpesvirus 5
gagacuaggucgucuuggaagccgaugcaacaacgguagaugagcagcaaaacgaccagaauc

SEQ ID NO: 4203962 - RNA, 57 nt, Human herpesvirus 5
gagaggaguggcugcuguguugucuuuauuucgcugacuucuacggaguuuucccuc

SEQ ID NO: 4203963 - RNA, 85 nt, Human herpesvirus 5
ggacggcuggagcuggaucgccagucccuggaagggacacaaaccguuccgcuucgaggcccaugguucucuggcaccggccgcc

SEQ ID NO: 4203964 - RNA, 78 nt, Human herpesvirus 5
ggcggcgugagcgcgaggcgucggagcucggggaaagcagcgcgacccggagaauggccggcgcugcgccgcgccgcc

SEQ ID NO: 4203965 - RNA, 65 nt, Human herpesvirus 5
gggucucggacgagucgacacgccgggugggacggucguggucuccucggcccgugccgggaccc

SEQ ID NO: 4203966 - RNA, 114 nt, Human herpesvirus 5
gagauucaggacgaggagccaaacugcgagcagccggagcccgcacacuggcuggaauacguggcgguccaguggcaggcccggguucgcgauucucacgaucgcuggugucuc

SEQ ID NO: 4203967 - RNA, 57 nt, Human herpesvirus 5
gaggagcgcauguucguggggucggucuuugccgcccccaacaggaucaucgaccuc

SEQ ID NO: 4203968 - RNA, 55 nt, Human herpesvirus 5
gaggaguggcugcuguguugucuuuauuucgcugacuucuacggaguuuucccuc

SEQ ID NO: 4203969 - RNA, 79 nt, Human herpesvirus 5
gaugaaccugagcaagaucaguuggcuggagcgacacugccccccguuggaccaggagcucaucauguucggggucauc

SEQ ID NO: 4203970 - RNA, 60 nt, Human herpesvirus 5
gcagcucgggcguguuuucguccucgaaagguaucggcggcggcgaaucgcccgggcugc

SEQ ID NO: 4203971 - RNA, 69 nt, Human herpesvirus 5
gcaggccagaggcuaagccgaaaccguccggggaagcgggcgcgaguuuuccgacuuagccuuuggugc

SEQ ID NO: 4203972 - RNA, 55 nt, Human herpesvirus 5
gcaggucgcggauuuguuaucgggugaaacgucacacaccgugaagacgaccugu

SEQ ID NO: 4203973 - RNA, 68 nt, Human herpesvirus 5
gcaggugguucaccacguccgugucgcgagaaaagguucgcaggucggccggggugaucuccagcugc

SEQ ID NO: 4203974 - RNA, 56 nt, Human herpesvirus 5
gcaguugcaguagagcaauuuauagauucugaagugcuuuuauugcugauaacugu

SEQ ID NO: 4203975 - RNA, 104 nt, Human herpesvirus 5
gccauggccuucgugcugugcgguggucuuuugucucuucgccucccggaggggaggagagccuacagacgggacgacacauagcgcacgaaaaagcacauggu

SEQ ID NO: 4203976 - RNA, 96 nt, Human herpesvirus 5
gcccgccggggcuucuggagaacgccggggcagcagcgaucuggggaagcugcuaaaccccugcguuuuuauaugguagcucugccgagcgcgggc

SEQ ID NO: 4203977 - RNA, 55 nt, Human herpesvirus 5
gccgaggacgccgugggcggcgaucgcgcuuuugaccgcgagcggcggacuuggc

SEQ ID NO: 4203978 - RNA, 73 nt, Human herpesvirus 5
gccgcagacuugaugugccgccgcccggauugcggcuucucuuucucaccuggaccggugguacugcuguggu

SEQ ID NO: 4203979 - RNA, 91 nt, Human herpesvirus 5
gccgcguugguccgcauggcuccggacucguuuaucgugagcuucaugauuucuacggguaucugcagcuggaccuucugggaccaguggu

SEQ ID NO: 4203980 - RNA, 58 nt, Human herpesvirus 5
gccgucugcagcucgucggccggcgugggcggcucgcggagacugggcugcaggcggc

SEQ ID NO: 4203981 - RNA, 57 nt, Human herpesvirus 5
gccgugugggaaugacggugauucuauuacacucuauaaacgguuucucauacgcgc

SEQ ID NO: 4203982 - RNA, 77 nt, Human herpesvirus 5
gccuacgauuuggccaugucguuucgcgucggcacucacaaguaugugcuggagcgcgacgacgaggccguccuggc

SEQ ID NO: 4203983 - RNA, 104 nt, Human herpesvirus 5
gcgacaaccggagcagagggucguuguccuccucguccucguggcgguuguuucuccgucgcgaucuccgagaggaggaggacgacgacgaugcagccugccgc

SEQ ID NO: 4203984 - RNA, 81 nt, Human herpesvirus 5
gcgagcaacagcagccgccgucgcuggugggcacgggcgugcaccgcggucugcucacggccacgggcugcugucugcugc

SEQ ID NO: 4203985 - RNA, 66 nt, Human herpesvirus 5
gcggcgugaccacgucaccgugccccacucgcucgcuuguguauaagagaaggguaggugcgccgc

SEQ ID NO: 4203986 - RNA, 92 nt, Human herpesvirus 5
gcgguccacaaagaacuucaacaggucguugaauugcuccgucuccauacagaugaagggccagacgccuuugagguucucggccuggccgc

SEQ ID NO: 4203987 - RNA, 90 nt, Human herpesvirus 5
gcuccugauacgcgccggcagcugcagcacguggagacgcugcgucgguuucugcgcggcgacagcugcuuugugcacgaucuccggggc

SEQ ID NO: 4203988 - RNA, 55 nt, Human herpesvirus 5
gcuguaccgccgcgucgucucguauugucagaacaaugugaagaugguggaccgc

SEQ ID NO: 4203989 - RNA, 88 nt, Human herpesvirus 5
gcuguagagcagcauguccaccucgaaggugucggugcguacggccgugagugcgaaucccggguggaugugcgccuuggucugcagc

SEQ ID NO: 4203990 - RNA, 62 nt, Human herpesvirus 5
ggcacggucucgcacgccaccugccgguaccagguguucguggacgcguacggcgccguguu

SEQ ID NO: 4203991 - RNA, 109 nt, Human herpesvirus 5
ggcgccgucguuaccgcggugcaacgcgcgcuagccgucuuugacguacuaagucgcgagaacuuggaacgccgcggcgcacagcucugucugacggaagcgacgagcc

SEQ ID NO: 4203992 - RNA, 67 nt, Human herpesvirus 5
ggcgggaggaggguggaaggggaggaggauagugguccggaucgccuucgguaucaucgucuuugcu

SEQ ID NO: 4203993 - RNA, 97 nt, Human herpesvirus 5
ggcgugcuugaggauauugcgacaguaguuggaaucaaaggaaaggcacaugcgcagcuccuugaccagcagcuugcagcgcuccugaaugcgcgcc

SEQ ID NO: 4203994 - RNA, 104 nt, Human herpesvirus 5
gggagagcgggugcgugggagaggucacucgcggcgugccgcugccgguggaaggggaagacgcgguagcaccgcggguuucgacuucuucacccuguucuucc

SEQ ID NO: 4203995 - RNA, 75 nt, Human herpesvirus 5
ggggcugacgcggaucggacaucauacugacgugaggcgcuccgucaccucucgggccgaaccccgucagcaccc

SEQ ID NO: 4203996 - RNA, 65 nt, Human herpesvirus 5
gggucccggcacgggccgaggagaccacgaccgucccacccggcgugucgacucguccgagaccc

SEQ ID NO: 4203997 - RNA, 61 nt, Human herpesvirus 5
gguucgcauuuucaguccgucuugcaagauguuaguggugaugucgcugaaauugcggauc

SEQ ID NO: 4203998 - RNA, 57 nt, Human herpesvirus 5
guaaagacaaaugagacgcugaaggccgcgaucagccucccgucucuuuauuuuuau

SEQ ID NO: 4203999 - RNA, 80 nt, Human herpesvirus 5
guaccaggauacaucgcgggaaaagagucgcuggcgaaacucggccagcagacaguguaguucuugccgaaacuuggugc

SEQ ID NO: 4204000 - RNA, 98 nt, Human herpesvirus 5
guaguaauuuucuucuugaccguuaucacggugaugccugguauauuuuccagcguuucuugugguuaaguuguagauaguuagggaggugucguugc

SEQ ID NO: 4204001 - RNA, 84 nt, Human herpesvirus 5
gucacguuuuccuuacacgguguugugucaaaaaauaagcguggugcguuugucuuugagcgcgcgacagauauagggggugau

SEQ ID NO: 4204002 - RNA, 79 nt, Human herpesvirus 5
gucacuggacucgguuucgcuguagcugugguucaaccugaacauggcucccagagcugcuaggaaccgguccagucac

SEQ ID NO: 4204003 - RNA, 81 nt, Human herpesvirus 5
gucauauagccuccggcugucaugggucugcgcuuucccaccgcgacccagcgacagaucguguuucggcggcuguucgac

SEQ ID NO: 4204004 - RNA, 66 nt, Human herpesvirus 5
gucggucucgagcgccccccgauguagggccgcucucuuacguaucccgggucgauucagacugac

SEQ ID NO: 4204005 - RNA, 76 nt, Human herpesvirus 5
gucguuuuguucaccgucgcugugcaacgcgugaaacaagagcgugaugcgcaccuucggcgguaugaagaacgau

SEQ ID NO: 4204006 - RNA, 74 nt, Human herpesvirus 5
gugaggagauguucgaugaucguauguuacaguuaugcuguaaggaagcuuuuaucgugcguccuguuuuucau

SEQ ID NO: 4204007 - RNA, 58 nt, Human herpesvirus 5
gugcucgcaguaguggcgcagcugggccgugaaaaccagcugguugaagagcgcgcac

SEQ ID NO: 4204008 - RNA, 88 nt, Human herpesvirus 5
guggcgucgacggugaacggcgcuacgucggccaacaaccacggcgaaccgccgucgccggccgacgcgcgcccgcgccucacgcugc

SEQ ID NO: 4204009 - RNA, 56 nt, Human herpesvirus 5
guggugcacguugaugcuggggauguucagcaucuugagcggcagcgcguacacau

SEQ ID NO: 4204010 - RNA, 57 nt, Human herpesvirus 5
guuucgcggcagcgcaagccgugguaaccgucgccgcuggcggcgcugccgcgagac

SEQ ID NO: 4204011 - RNA, 62 nt, Human herpesvirus 5
guuugagccgcagauccgagagccucaccugcgugacggcgucuucggucucgagcaaaaac

SEQ ID NO: 4204012 - RNA, 65 nt, Human herpesvirus 5
uaggcgcacgauggccaugcgcgucaguuguuggucaauuaccgagcgcaggauauggcagccug

SEQ ID NO: 4204013 - RNA, 56 nt, Human herpesvirus 5
ugaagcggagugcaucucgagucgcucggaaacgacucaccagacuuuuugcuuua

SEQ ID NO: 4204014 - RNA, 55 nt, Human herpesvirus 5
ugacgcgcguggccgcgcuggcucgcgacgagggucugcgcgacauuuuggguca

SEQ ID NO: 4204015 - RNA, 60 nt, Human herpesvirus 5
ugcccgggccaugcaucgccucgacgcccaaaaagcaccgagguugagccacccgccgca

SEQ ID NO: 4204016 - RNA, 79 nt, Human herpesvirus 5
uguagucccgagguggugugcgaucccuuccagucguguggagugguuugggguggcauccaaacgugagguauugaca

SEQ ID NO: 4204017 - RNA, 56 nt, Human herpesvirus 5
ugucugcucauucuggcggcgcaaaugagcuacggcgccugucuccugggcgagca

SEQ ID NO: 4204018 - RNA, 58 nt, Human herpesvirus 5
uguuguugcgggauguucaagggaccgcuggucgguuucugacugcccgaggauaaca

SEQ ID NO: 4204019 - RNA, 60 nt, Human herpesvirus 5
uugcgucuccaugauugugccgcguucgaguccugcuguuacgacaucaccgaggcggag

SEQ ID NO: 4204020 - RNA, 87 nt, Human herpesvirus 5
uuuugccggcguuuguuuucucaucaaccugucgauggaucgcuacugcgucaucguuugggguguagaauugaaccgcgugcgaaa

SEQ ID NO: 4204021 - RNA, 77 nt, Human herpesvirus 5
uuuuugcgaugucgcagccggucuagcagguuaggcuucugucccuuguccugcgugccagucuguccguccaaaga

SEQ ID NO: 4204022 - RNA, 81 nt, Human herpesvirus 5
ggaacggaggaggcuuucgccacaccuauccugaaagcguugcauucuuuaugauaggugugacgaugucuuuaccauucc

SEQ ID NO: 4204023 - RNA, 93 nt, Human herpesvirus 5
accacccgccggaacgcuguuacgauuucaaaaugugcaaucgcuucaccgucgcguacguauuuuuaugauugucugcguucuguggugcgu

SEQ ID NO: 4204024 - RNA, 101 nt, Human herpesvirus 5
acgucagcgucauauugcgcagcaggccgcgcagucguacguagccgcgggugugaucuacgaacugguguaggcccagcugguagugcuugaugagaugu

SEQ ID NO: 4204025 - RNA, 59 nt, Human herpesvirus 5
agaggaacuaucuucaucgggccggcccaagggaucgggaagaggagggugguucaucu

SEQ ID NO: 4204026 - RNA, 63 nt, Human herpesvirus 5
auacaaaccggcgacgccaaguacgguauucguaaccagcauuugaguauacgguuaauguau

SEQ ID NO: 4204027 - RNA, 65 nt, Human herpesvirus 5
cagcgcggcggcggucucugucucuggugccgcggcgcuaaccuucggggcuguugcugcuguug

SEQ ID NO: 4204028 - RNA, 76 nt, Human herpesvirus 5
ccagcagugcuccagcggcguuucgguccacguguccuggagcaguugacugagauugagaucccgggagcguugg

SEQ ID NO: 4204029 - RNA, 128 nt, Human herpesvirus 5
cccggaagguugggggcugggggcccggucaggagcuccgggagcggggucgaccgcgacggcuuccgggucucgcggcggcucccucucggcggcuccgguugggcuccccuccccccucucgaggg

SEQ ID NO: 4204030 - RNA, 77 nt, Human herpesvirus 5
ccgaugaacgcucucgucaggcuugucauggucuguaaaagcugcaugaaaaacacgacgaaagcguucaguguugg

SEQ ID NO: 4204031 - RNA, 79 nt, Human herpesvirus 5
ccgcacggcgguuucgccaccgcugacguucucaucgccgcccacgucaacgguggcgacaccguacuuucccaugcgg

SEQ ID NO: 4204032 - RNA, 83 nt, Human herpesvirus 5
ccgcauagccucuacaaacuagcauucuggugagauacauguucauaaacucucacgggaaggcuaguuagacaggcuauggg

SEQ ID NO: 4204033 - RNA, 87 nt, Human herpesvirus 5
ccgucgccgucuucuucgaaccgcacgaggaaaacgugcugcgcugccccgagcgcgugcuucggcgguugcuggaggacgcggcgg

SEQ ID NO: 4204034 - RNA, 73 nt, Human herpesvirus 5
ccguugggacggucgacguuggcugcgcacccgcuacgggaacgccagcgccugcgugacgggcacccaaugg

SEQ ID NO: 4204035 - RNA, 109 nt, Human herpesvirus 5
cgccgcugucgaacaugguaaagugcagacgcgccgccucgcccauguguacgcagccuccguugcguuccagccuggccgcgcgccguagaccguguucguagcggcg

SEQ ID NO: 4204036 - RNA, 63 nt, Human herpesvirus 5
cgcgcuauuauccaccauccgaagcuacagccgggcguuggccuguggauagauuucugcgug

SEQ ID NO: 4204037 - RNA, 65 nt, Human herpesvirus 5
cgcgggccacgucgggcugcugccgccgccacccggcccggcggcgcccgagcgggacauccgcg

SEQ ID NO: 4204038 - RNA, 79 nt, Human herpesvirus 5
cggaauacuuugcgcuguuacacggaauccagaccuucagcuacgggcuggacuuucggucgcaguuggaaaagauccg

SEQ ID NO: 4204039 - RNA, 73 nt, Human herpesvirus 5
cggcuuggucuucacguccagcagcgguaccagucccaccguuacgcaccaauccacguagagaccauagucg

SEQ ID NO: 4204040 - RNA, 121 nt, Human herpesvirus 5
cgucagguacaugucuuucgguaucaucaacgcgaacaccuccguuuugagcguguuguaaagguagccgcgcaugacgcaggugagcaacgaggugaugcccagcgagacggucuugacg

SEQ ID NO: 4204041 - RNA, 89 nt, Human herpesvirus 5
cguccgccuguacgcggaccgaucaccagaaggcggacauugggcugugguucauguuucugguuuuuggacuguguucgugguuggcg

SEQ ID NO: 4204042 - RNA, 112 nt, Human herpesvirus 5
cgucgucgucgcguggcaugggcggcggccgacggcggacgaccggcauggcgcggccgucguuuccuucgucuuccucuucaccgucucccaaggaacgcggucgacgacg

SEQ ID NO: 4204043 - RNA, 59 nt, Human herpesvirus 5
cgucuugccgucguccgucacccgggcgucgagauguucguagagaacgauggaggacg

SEQ ID NO: 4204044 - RNA, 85 nt, Human herpesvirus 5
cguugaccuaguuagauuuccuguguagaacaaugaccggacgugcuuggacugguacauacgcaggggcuggacgugguuaccg

SEQ ID NO: 4204045 - RNA, 60 nt, Human herpesvirus 5
cguuuugcgacacguguccgcgauaccuggugccguugcgggcacugggucugcacgacg

SEQ ID NO: 4204046 - RNA, 89 nt, Human herpesvirus 5
cugccuucgccguugcuguuccuccgcagaagggccgucgcgagucccgccgcugccacccagcgaggacacgcagacggcggaagcgg

SEQ ID NO: 4204047 - RNA, 75 nt, Human herpesvirus 5
cuggugucgguaggcgccuacggccgccacgcccgugcccgaggccuugcgguugguggugaaggccggguccag

SEQ ID NO: 4204048 - RNA, 73 nt, Human herpesvirus 5
gaauaaguugcgauagcgggccaucgcgucugguaacauucaccaacgggcgcagccaacuuucauacuuguc

SEQ ID NO: 4204049 - RNA, 60 nt, Human herpesvirus 5
gacaacgugguccaguacguccauccuuugcauuccgguguccagacgggaagcguuguc

SEQ ID NO: 4204050 - RNA, 67 nt, Human herpesvirus 5
gacagccuccggaucacaugguuacucagcgucugccagccuaagugacggugagauccaggcuguc

SEQ ID NO: 4204051 - RNA, 55 nt, Human herpesvirus 5
gacgaggauuccgacagcucggauggcuauccccccaaccgucaagauccgcguu

SEQ ID NO: 4204052 - RNA, 83 nt, Human herpesvirus 5
gacuuaggcacagcacgaugcccaccaccaccagugugccgcacaaggccguggcgguaggguaugugucugaaaaugagcuc

SEQ ID NO: 4204053 - RNA, 82 nt, Human herpesvirus 5
gagccaaacugcgagcagccggagcccgcacacuggcuggaauacguggcgguccaguggcaggcccggguucgcgauucuc

SEQ ID NO: 4204054 - RNA, 55 nt, Human herpesvirus 5
gagcggccagaccucgccgaaggagcccuggcccaggcgguagcucucgucgcuc

SEQ ID NO: 4204055 - RNA, 81 nt, Human herpesvirus 5
gaucucgcgcgugacgaggcgcggaccgugaguuauagccccaucguuauccaagacugcgccgcggcugucaccgacguc

SEQ ID NO: 4204056 - RNA, 73 nt, Human herpesvirus 5
gccgaggacuuuaugacgcgcguggccgcgcuggcucgcgacgagggucugcgcgacauuuugggucagcggc

SEQ ID NO: 4204057 - RNA, 103 nt, Human herpesvirus 5
gcgaggccgaacggugaaucuuggcguggcgcacgcagcgaccguaguugucgcgguccgcgucgcguagcgcuucgauccacgaggucaccacguccugcgc

SEQ ID NO: 4204058 - RNA, 56 nt, Human herpesvirus 5
gcgccggcacgaugcagcuggcccagcgccugugcgagcugcugaugugccgucgc

SEQ ID NO: 4204059 - RNA, 67 nt, Human herpesvirus 5
gcgcguuuccccguagccggccuacggcguuauugcaugucggagcugucggcgcuggguaacgugc

SEQ ID NO: 4204060 - RNA, 78 nt, Human herpesvirus 5
gcggucuguucagguggaugagggcucuucacggucgggcacucggcugugccugucauccacuuggagagcucccgc

SEQ ID NO: 4204061 - RNA, 96 nt, Human herpesvirus 5
gcgucagaucuaguagccguugcacgcgucgcggcguaugcaaguggucuuccagcacgcgaucgcacacgcgcgcguaagcgucuagguuggcgc

SEQ ID NO: 4204062 - RNA, 62 nt, Human herpesvirus 5
gcguccgccguguuucucggcguacugcugcacccagacguggccgcuaaauauggcgacgc

SEQ ID NO: 4204063 - RNA, 61 nt, Human herpesvirus 5
gcgucuucauguacgccguuuucggccucacgaggucggaggucacgccacaugaagccgc

SEQ ID NO: 4204064 - RNA, 55 nt, Human herpesvirus 5
gcgugcacgcgcugcuuucgcacgcaccugugugaucugggcagcggcugcgcgc

SEQ ID NO: 4204065 - RNA, 99 nt, Human herpesvirus 5
gcgugcguccaccaccagcgaacgcacgaucucgggccaguagcagagguggacucggauagagaccucuggccagucgugcgcggggaagaugcaggc

SEQ ID NO: 4204066 - RNA, 93 nt, Human herpesvirus 5
gcguguccagccuucccaugcgggaacuggccuggcggcggguagccgacgacucgcacgaccuaugguguugcuguauggacuggaaggcgc

SEQ ID NO: 4204067 - RNA, 65 nt, Human herpesvirus 5
gcguuccggcgggugguugacguuuaugaauucgcaacauucuucugcgcgcacccgcggcacgc

SEQ ID NO: 4204068 - RNA, 118 nt, Human herpesvirus 5
gcugcuguuucucacgcugcaccaccucgucguccacccguuucugccgcucgcgacgcuuuuccucuucgucguaauagccgacggccgccgaacgggcagcgugggcuucggcggc

SEQ ID NO: 4204069 - RNA, 59 nt, Human herpesvirus 5
gguccagcagcgugugcaguucggcgucgagacagacggcgugauugagcaccugcgcc

SEQ ID NO: 4204070 - RNA, 63 nt, Human herpesvirus 5
ggugaaacgcggaucuugacgguuggggggauagccauccgagcugucggaauccucgucgcc

SEQ ID NO: 4204071 - RNA, 73 nt, Human herpesvirus 5
guacgacggggcccucgcucgucgugccucuuccccccuccgggagaggggacgucggggcccuccgucgcac

SEQ ID NO: 4204072 - RNA, 65 nt, Human herpesvirus 5
gucaaagagaccccgcugugccgccucaaauacuaggcgguccaacugcagccgcuucucucgac

SEQ ID NO: 4204073 - RNA, 69 nt, Human herpesvirus 5
gucucuagagggaagguggggaaugucuaagcgagcgggagcgugucaucucccccaucuuuuuacaac

SEQ ID NO: 4204074 - RNA, 65 nt, Human herpesvirus 5
gucugcaggacggcgcucguuccacccaggugcaaggcguguaggaacaugaugccguugcagac

SEQ ID NO: 4204075 - RNA, 116 nt, Human herpesvirus 5
gugacgcuguuccugccuucgccguugcuguuccuccgcagaagggccgucgcgagucccgccgcugccacccagcgaggacacgcagacggcggaagcgguagacgcggcgccgc

SEQ ID NO: 4204076 - RNA, 55 nt, Human herpesvirus 5
guggcgcuucgcuacgcggugaggaaacugaugaagcgcggagccaggcugcggc

SEQ ID NO: 4204077 - RNA, 105 nt, Human herpesvirus 5
gugucaagcugguacugggucgucuguuacugggacccguggccguacccuguuuuugcgacggugaaguggagggccacggugaacaucugguaccuacgacgc

SEQ ID NO: 4204078 - RNA, 116 nt, Human herpesvirus 5
gugugacgugagucugauccaacacugaacgcuuucgucguguuuuucaugcagcuuuuacagaccaugacaagccugacgagagcguucaucggggcaugaaguacgcauuacac

SEQ ID NO: 4204079 - RNA, 66 nt, Human herpesvirus 5
guguuuuugcucgagaccgaagacgccgucacgcaggugaggcucucggaucugcggcucaaacac

SEQ ID NO: 4204080 - RNA, 59 nt, Human herpesvirus 5
guucaugcugccuaucuacgagacggccgcgaaggccuacgccguggggcaguuugagc

SEQ ID NO: 4204081 - RNA, 83 nt, Human herpesvirus 5
uauuccuuuccuguuuuguacucguaaacuguugauguuguuuuuacauccaaaagggcaaguaagaaacaggaugaggcaug

SEQ ID NO: 4204082 - RNA, 74 nt, Human herpesvirus 5
uccaagucagagcagcgucggucaugacgcggcgaaacgccguugaccuggaccgaccgccgcuuuggucggga

SEQ ID NO: 4204083 - RNA, 92 nt, Human herpesvirus 5
uccccgaauuugggcgguggcggccuuggcggucgggucugucuuuuaugaugcuccgacugucggggcgcagaaacuuuuccgucggugga

SEQ ID NO: 4204084 - RNA, 63 nt, Human herpesvirus 5
ucgaacagcgggucgcucuugauaaacacguagguggugguaaaacuucggcccgcaaucuga

SEQ ID NO: 4204085 - RNA, 94 nt, Human herpesvirus 5
ucgaccggcggcugcuguugcacgggcucgggugacggcgacaucacggucacuucauccuccucgucgcccucuuccagcagccgcuggucga

SEQ ID NO: 4204086 - RNA, 59 nt, Human herpesvirus 5
ucgccgcccgguaauucgacgccgcauucguuguacggaacgcggcacaugggcggcgg

SEQ ID NO: 4204087 - RNA, 58 nt, Human herpesvirus 5
ucgcgcucgccaggcgcuacguuguuuaagacggggucgacgaggcuggugagcgcga

SEQ ID NO: 4204088 - RNA, 57 nt, Human herpesvirus 5
ucgucacgcucaaggacaucgaggagaucaagcccucggccuacggagugcugacga

SEQ ID NO: 4204089 - RNA, 62 nt, Human herpesvirus 5
ucucacaauguggacauggccuaugccugcgacaacgcgggcguacuaccccacgucaagga

SEQ ID NO: 4204090 - RNA, 107 nt, Human herpesvirus 5
ucuugcucgacgugccgcgucuggagaacuauuuucuuugucaagucugucuuuacgagcuggacgaggacgagaugggcgaggagaugcugggcauguuggccgga

SEQ ID NO: 4204091 - RNA, 67 nt, Human herpesvirus 5
ugcgagcagccggagcccgcacacuggcuggaauacguggcgguccaguggcaggcccggguucgcg

SEQ ID NO: 4204092 - RNA, 67 nt, Human herpesvirus 5
ugcgccgguacgccgggaagguacccugcggaaacccgcucuacguacuggcccgacaagcggugca

SEQ ID NO: 4204093 - RNA, 90 nt, Human herpesvirus 5
uggcaguaucguguugugcuucaacguuaccggcggcauaguggaccgcgguauguguuaaguugguugagguaaaugaugauauaguua

SEQ ID NO: 4204094 - RNA, 79 nt, Human herpesvirus 5
ugggcauuaauauuccuuugaacgcugagccuuacagaauguuuuaguuuauuguucagcuucauaagaugucugcccg

SEQ ID NO: 4204095 - RNA, 96 nt, Human herpesvirus 5
uuugugcaccgacuccaugucucuggccggcgccagaccggacgacagcgucucguacgugagcgagucgagucauggagaugaauuuguuacaga

SEQ ID NO: 4204096 - RNA, 69 nt, Human herpesvirus 5
uagcuguuguuuuuuggugaauauaguuugguaaguccuuagcggguaaguucuaagaaacauuaguua

SEQ ID NO: 4204097 - RNA, 61 nt, Human herpesvirus 5
uccauacguuuuugggaaaguugggcucggcccaacgcaacagaccuaggcacacgaugga

SEQ ID NO: 4204098 - RNA, 55 nt, Human herpesvirus 5
ucucagugugagcacuacccuaguuucgugaaacucaacggggugcagcgcugga

SEQ ID NO: 4204099 - RNA, 77 nt, Human herpesvirus 5
ugauagaacuguuguauacgaagcaauauuguuauccaccaaagcagccacguguaucuauacauuguaguucauca

SEQ ID NO: 4204100 - RNA, 120 nt, Human herpesvirus 5
uggugugcgacgggcccccgggcucgcccacugacucggcgcgucacaugagcgaucuggcuagccuggcgcucacggccgaguucggccugggcugucuggaagcuuacgugcgcauca

SEQ ID NO: 4204101 - RNA, 79 nt, Human herpesvirus 5
ugguuuuggguuaaagcaaaaagucuggugagucguuuccgagcgacucgagaugcacuccgcuucagucuauauauca

SEQ ID NO: 4204102 - RNA, 118 nt, Human herpesvirus 5
uuccccacaguuagacggaguguaucgagcucgccggcggcgaaacaaccagcgccggguacuguggcgcagucguuuccaccaggugaacuugcucuccgcgacgaaaccggaggaa

SEQ ID NO: 4204103 - RNA, 118 nt, Human herpesvirus 5
uuccuccgguuucgucgcggagagcaaguucaccugguggaaacgacugcgccacaguacccggcgcugguuguuucgccgccggcgagcucgauacacuccgucuaacuguggggaa

SEQ ID NO: 4204104 - RNA, 76 nt, Human herpesvirus 5
uugugacguagcaauuaucguauugugcaugugucguucaucacagaguuuaguauacuaauaugaagcgucgcga

SEQ ID NO: 4204105 - RNA, 61 nt, Human herpesvirus 5
uuucugauacuggaucgucugucggccauaucuuacggccgugaucucuggcaucaugaga

SEQ ID NO: 4204106 - RNA, 67 nt, Human herpesvirus 5
uuuucgccgcuucucguaaaaccuucugcuccguaacgaccggagucguuuaacgugagguugaaga

SEQ ID NO: 4204107 - RNA, 58 nt, Human herpesvirus 5
aaacgacguagacgaugaaccguacgaaucgcggcacaacgacuggacgacgucguuu

SEQ ID NO: 4204108 - RNA, 81 nt, Human herpesvirus 5
aacguggagacgcacgacaguauacgugccguugagguagaagacaaacucgcguaaccguuguccguuauacgucacguu

SEQ ID NO: 4204109 - RNA, 111 nt, Human herpesvirus 5
aaucacgucguccagcagcuggucgcguagcuccggcauggugcugccgggccguaccugcaggaaccaguugugcggaaugccgagcgacagcaccuggucgacgugguu

SEQ ID NO: 4204110 - RNA, 62 nt, Human herpesvirus 5
accagcaguaugacgugcgaugguauuacgcccgacgugauuuacgaggucugcauguuggu

SEQ ID NO: 4204111 - RNA, 63 nt, Human herpesvirus 5
accgcugggaaaauugaaagacacgcugcguuuggcgugcugauuguaguuuuugcuauuggu

SEQ ID NO: 4204112 - RNA, 86 nt, Human herpesvirus 5
acgcgagaugaacuguuccacggccagcgccuugucgcggcccaugagguagaagggcuguucgaugugguucuggucgggcgugu

SEQ ID NO: 4204113 - RNA, 91 nt, Human herpesvirus 5
agcgccggccauucuccgggucgcgcugcuuuccccgagcuccgacgccucgcgcucacgccgccgccgcgauggagaacuggucggcgcu

SEQ ID NO: 4204114 - RNA, 57 nt, Human herpesvirus 5
aggagcggggcguccgaaggcgaggauggcauggucucgccggagcgcccggcuuuu

SEQ ID NO: 4204115 - RNA, 110 nt, Human herpesvirus 5
auaaaaacauccuccguaguggcgugcgcgaccccuagucgguugaguuccgccagcaacgaguucauggcggcuguggcgggucgcgacgacgacacuuucguuuuuau

SEQ ID NO: 4204116 - RNA, 109 nt, Human herpesvirus 5
aucacgucguccagcagcuggucgcguagcuccggcauggugcugccgggccguaccugcaggaaccaguugugcggaaugccgagcgacagcaccuggucgacguggu

SEQ ID NO: 4204117 - RNA, 72 nt, Human herpesvirus 5
auggagugagaggccggaccacuggcguuuuaaauccgagauaauugcccggucugccucuugggaauccgu

SEQ ID NO: 4204118 - RNA, 61 nt, Human herpesvirus 5
augucucccuuggagaacgucgcaccguuucgaaggcggcacuguucuccaauggauacgu

SEQ ID NO: 4204119 - RNA, 85 nt, Human herpesvirus 5
caaacccguuacaaguauguggaacagcucguggaccucacguugaacuaccacuacgaugcgagccacggcuuggacaacuuug

SEQ ID NO: 4204120 - RNA, 69 nt, Human herpesvirus 5
caacaggccggcgcgcacagccuccugucgauuacgaaucggcgucagguaggcgcgcaggaacuggug

SEQ ID NO: 4204121 - RNA, 103 nt, Human herpesvirus 5
caccacgggggcguacuuugacaacggcuggaaauggacuuuugcucucuuaguggucgcuauauuagggaucauuuucuuggccgugguguucaccguggug

SEQ ID NO: 4204122 - RNA, 90 nt, Human herpesvirus 5
cagagccguucggggcgugcggccgcgcuagcgcuucauuuucucacgucacgaaaaggagugacggacggccaguacgccacgucucug

SEQ ID NO: 4204123 - RNA, 85 nt, Human herpesvirus 5
caucacggaacaggcggcgaccgcggacucgccucggccaggggguaccgaggcggugcccgcgacucgccccuccuccaagaug

SEQ ID NO: 4204124 - RNA, 84 nt, Human herpesvirus 5
ccauuuuauacauguagggcagacguacagagcguccauggugguagaugccugugucuaggcugcucucgggaugcgagaugg

SEQ ID NO: 4204125 - RNA, 62 nt, Human herpesvirus 5
ccgacugugggaagcuguccacguagauaucaaaguccucgaugagcagcuccaacagcgug

SEQ ID NO: 4204126 - RNA, 72 nt, Human herpesvirus 5
ccgcgguuauuaucaacgucucuguguuuuuauuauuuagaaauaaauacagggaaugggaaaaacacgcgg

SEQ ID NO: 4204127 - RNA, 67 nt, Human herpesvirus 5
ccgggcguguggcgccagcgaaccggcggcguugaacgugguccuuuuguuggugccgccgcgacgg

SEQ ID NO: 4204128 - RNA, 58 nt, Human herpesvirus 5
ccugaugcuggucaugguauauaccacccucacuacgauauccguguccaccaucggg

SEQ ID NO: 4204129 - RNA, 94 nt, Human herpesvirus 5
cgacgugccgcgucuggagaacuauuuucuuugucaagucugucuuuacgagcuggacgaggacgagaugggcgaggagaugcugggcauguug

SEQ ID NO: 4204130 - RNA, 55 nt, Human herpesvirus 5
cgaggccugauccguggagaacuuguccagcaacaucuccaggcugucggccucg

SEQ ID NO: 4204131 - RNA, 55 nt, Human herpesvirus 5
cgcaaaauaucgaacucuucgcggcucugguccgugaugagcacgguguucugcg

SEQ ID NO: 4204132 - RNA, 75 nt, Human herpesvirus 5
cgccgucugcguguccucgcuggguggcagcggcgggacucgcgacggcccuucugcggaggaacagcaacggcg

SEQ ID NO: 4204133 - RNA, 75 nt, Human herpesvirus 5
cgcgagcgcaugaaacaugauccugagaacgucaucuauuucagaaaggauggcaacuuggacacgucguucgug

SEQ ID NO: 4204134 - RNA, 71 nt, Human herpesvirus 5
cgcgaguaucgggccgucgcuugccguucgacgaucuuuaguccggaggacgacagcucguguaucuuaug

SEQ ID NO: 4204135 - RNA, 64 nt, Human herpesvirus 5
cggcugcugugaaaacgggcacgguuuuauaggcauuaggacuuccccgucguacuggcggcug

SEQ ID NO: 4204136 - RNA, 103 nt, Human herpesvirus 5
cggcuguuucuaccaccgccaccaccgccgccuccucgaguauuguuccgggcccgaccccgacguccgcccgacggugguggcggcggcggcaguggagccg

SEQ ID NO: 4204137 - RNA, 89 nt, Human herpesvirus 5
cgggcgcgacgguggacucggccuuaaggcggccgcgugucauaacgcccgacgugcacgccgucgccgaggaugcugauuugcguuug

SEQ ID NO: 4204138 - RNA, 111 nt, Human herpesvirus 5
cgggcugaagaccgugcggggaggauugacgugugcggugcuuguggaacacgguguuuuaauauguauccgcguguaaugcacgcggugugcuuucuggcacucagcuug

SEQ ID NO: 4204139 - RNA, 59 nt, Human herpesvirus 5
cgguagauguccaggugcuuacgcuuaccgauccgcuuacgcacgugaggcaaucuccg

SEQ ID NO: 4204140 - RNA, 80 nt, Human herpesvirus 5
cguagaucagcagcgagccgcguaacgucugagcagccggcaguucgucgcggauguaacgcgugccguagaaagucacg

SEQ ID NO: 4204141 - RNA, 59 nt, Human herpesvirus 5
cguccgcgugucuaaaccgcgugcucgcugacgcggguuugcuuccuauauaguggacg

SEQ ID NO: 4204142 - RNA, 64 nt, Human herpesvirus 5
cgucguguagccacacggucucggucagggccucguccgagaaacggcugucggguacgugacg

SEQ ID NO: 4204143 - RNA, 67 nt, Human herpesvirus 5
cgugacgcucgauggguccgcuucaucagacugcguacgcuuuggagcgucagacccagggcgcaug

SEQ ID NO: 4204144 - RNA, 70 nt, Human herpesvirus 5
cgugccucaugucacaggcgcccgaggcgucgcacaugacgucugagcgccgcugacaguuuugggggcg

SEQ ID NO: 4204145 - RNA, 56 nt, Human herpesvirus 5
cugcgugcacggccaagacauugugcgcgaaagcgagaauucggccgugcacgugg

SEQ ID NO: 4204146 - RNA, 129 nt, Human herpesvirus 5
cuuacagucuugcgguuccgucuccggggacgccagucgcaugggcagcagguccuccagcgcgauggaagcgcccagcaccgagagcugcuguugcgacggcgaaugggauguggaccgcgaguguag

SEQ ID NO: 4204147 - RNA, 78 nt, Human herpesvirus 5
gacaagggucguagauacauguauuuguuuuccguguccugcgcgggaaucacagguaccguaucuauuauacucguc

SEQ ID NO: 4204148 - RNA, 69 nt, Human herpesvirus 5
gacguacuuguauuugcuggcaaaaaguggcgcguaccgacagucggccggcaaaauguagguggcguu

SEQ ID NO: 4204149 - RNA, 84 nt, Human herpesvirus 5
gagcaguagcggacgugucaucucgcccggagugcgcagaggcacgcauucgccgcgauaacgacaggucacacgcuguaguuc

SEQ ID NO: 4204150 - RNA, 66 nt, Human herpesvirus 5
gaggcuaccugaccguagcgguuagcuuuucuuacgaauugcugggaucguugcgguugucgccuu

SEQ ID NO: 4204151 - RNA, 64 nt, Human herpesvirus 5
gagggcauucaguugauggguggugcuacucaggaaccgcuggauacuggacuguaugcuccuu

SEQ ID NO: 4204152 - RNA, 82 nt, Human herpesvirus 5
gaucgaggccgucuuuuuucaauacgucaaggugcaauucggcuaccaccugggcgccuucuuuggacucugcggccucauc

SEQ ID NO: 4204153 - RNA, 111 nt, Human herpesvirus 5
gaugcugcugucgcucaaggucgacgcgcaucacguccuuuaagagcuguuuguugaccgacgucauagauucaacgugaugagacccgcgucguucagcgagagagcguc

SEQ ID NO: 4204154 - RNA, 61 nt, Human herpesvirus 5
gauucuggucguuuugcugcucaucuaccguuguugcaucggcuuccaagacgaccuaguc

SEQ ID NO: 4204155 - RNA, 60 nt, Human herpesvirus 5
gcaccaguucugcccucggugcauggacgccgucugguccacgcaccgagagacugaggc

SEQ ID NO: 4204156 - RNA, 96 nt, Human herpesvirus 5
gccagagggaccuucgcuuggcguucaggccuuaauacuagccgcaucuuaccugucggcagcauguaucggggcuccgacgccuuacccgccggc

SEQ ID NO: 4204157 - RNA, 57 nt, Human herpesvirus 5
gccgcggcgcucggucgacgcguuguuacuggcgaucaaguccgccgccgccgcggu

SEQ ID NO: 4204158 - RNA, 101 nt, Human herpesvirus 5
gccgcuggcgagcaacagcagccgccgucgcuggugggcacgggcgugcaccgcggucugcucacggccacgggcugcugucugcugcacaacgucacggu

SEQ ID NO: 4204159 - RNA, 64 nt, Human herpesvirus 5
gcgacauggacggcgacgugcguaccgcggcagacaucagcagcacguugcgguccgugcccgc

SEQ ID NO: 4204160 - RNA, 84 nt, Human herpesvirus 5
gcgagcccuauccggauuacaacgagcgcuguguggccgucuuucaggagacggguacggcgcgccgcauccccaacugcucgc

SEQ ID NO: 4204161 - RNA, 71 nt, Human herpesvirus 5
gcgcagcaaacagaucgcguuucagcucgugaauggcaucccgcaguucaucguaacguuguugcugcugc

SEQ ID NO: 4204162 - RNA, 59 nt, Human herpesvirus 5
gcggagcagggagcgcaaggccgagcgucguucgcgcggcgugcgcacgccgcucacgc

SEQ ID NO: 4204163 - RNA, 78 nt, Human herpesvirus 5
gcuugaagaccgcaggcgugccggcgcccauggccgccacuguggcgcgugaaucguugguacggagcguuuuugagc

SEQ ID NO: 4204164 - RNA, 80 nt, Human herpesvirus 5
ggaggcugagagucgccuguacgacgccaucaccgagaaccugaugcacugcgucaaacuggugacgacggacucgcccc

SEQ ID NO: 4204165 - RNA, 59 nt, Human herpesvirus 5
ggcacggaccgcaacgugcugcugaugucugccgcgguacgcacgucgccguccauguc

SEQ ID NO: 4204166 - RNA, 79 nt, Human herpesvirus 5
ggcagguucuuguacucaagagagcgauugguguugcggaacaugcggcucaccucgucaaucuugacgcgaccccgcc

SEQ ID NO: 4204167 - RNA, 71 nt, Human herpesvirus 5
ggccaagaucagcggcgugaugguaagcacggccaacguuaugcagaucaucaugucgcugcucucaagcc

SEQ ID NO: 4204168 - RNA, 55 nt, Human herpesvirus 5
ggcgcgcgucggccggcgacggcgguucgccgugguuguuggccgacguagcgcc

SEQ ID NO: 4204169 - RNA, 76 nt, Human herpesvirus 5
ggcgcucuggauggauugggcggacgugcguagcuguauuauuaaggcgcuaacgccucgucugagccggggugcc

SEQ ID NO: 4204170 - RNA, 119 nt, Human herpesvirus 5
ggcgcugcugcacuucggguagcugcaggccgccuagcgcuuccagcugagcuagcugcuccuguaccaaggccagugucagcgccgagccgcggcugcccgggucgcgcaccagcguc

SEQ ID NO: 4204171 - RNA, 81 nt, Human herpesvirus 5
ggcguaaaccgucgagguugaaaaaccgcguaucugcgacccguccggacuacguuguuuuucagaagcggccacaugacc

SEQ ID NO: 4204172 - RNA, 65 nt, Human herpesvirus 5
ggcgucggagccccgauacaugcugccgacagguaagaugcggcuaguauuaaggccugaacgcc

SEQ ID NO: 4204173 - RNA, 106 nt, Human herpesvirus 5
ggguccuucgguuagcggucuguucagguggaugagggcucuucacggucgggcacucggcugugccugucauccacuuggagagcucccgcgguccgauuggccc

SEQ ID NO: 4204174 - RNA, 82 nt, Human herpesvirus 5
gguaccaggauacaucgcgggaaaagagucgcuggcgaaacucggccagcagacaguguaguucuugccgaaacuuggugcc

SEQ ID NO: 4204175 - RNA, 55 nt, Human herpesvirus 5
gguacuugacgcgggugcgcgugccauagcagcucaguugucaaguccgagugcc

SEQ ID NO: 4204176 - RNA, 79 nt, Human herpesvirus 5
gguauuuuuccacugggcggccgcaccuagggagcgcgagccccgugccgggcaugggccgcggcgguggaaaauuacc

SEQ ID NO: 4204177 - RNA, 60 nt, Human herpesvirus 5
gguggggcaccacacgcgccagcgugccaauggugcgucgcagugugagguguucacacu

SEQ ID NO: 4204178 - RNA, 56 nt, Human herpesvirus 5
guacuuuccgcuguuuuccgucgucagauuuagcaacgucaagcgguuauaggugc

SEQ ID NO: 4204179 - RNA, 89 nt, Human herpesvirus 5
gucuccauguguguauaaaaagcaaggcacguucauaauguaaaaaagaacacguuguaaacaagcuauugcuguaucauucggcugac

SEQ ID NO: 4204180 - RNA, 129 nt, Human herpesvirus 5
gucuggccgagcggcgccaucuuggaggaggggcgagucgcgggcaccgccucgguacccccuggccgaggcgaguccgcggucgccgccuguuccgugaugcuaccuagagggcgcugucgaggcgac

SEQ ID NO: 4204181 - RNA, 80 nt, Human herpesvirus 5
gugacaaguaugaaaguuggcugcgcccguuggugaauguuaccagacgcgauggcccgcuaucgcaacuuauucguuac

SEQ ID NO: 4204182 - RNA, 84 nt, Human herpesvirus 5
gugcgacagcuccgccgccagcggguacacgugcccguccagcgggcaguacccgaacacggcgcccagcucguccagcagcac

SEQ ID NO: 4204183 - RNA, 64 nt, Human herpesvirus 5
guggcgguuguuucuccgucgcgaucuccgagaggaggaggacgacgacgaugcagccugccgc

SEQ ID NO: 4204184 - RNA, 77 nt, Human herpesvirus 5
guuaccggucacagagcgugcugacguggacgcacgaguguaauaccacggaaaacgguaguuuuguagccgguuac

SEQ ID NO: 4204185 - RNA, 71 nt, Human herpesvirus 5
guuucuccuccgccacucgucagcucgccggugggaguacacacgguaguaguaguuggggaggaagaggc

SEQ ID NO: 4204186 - RNA, 85 nt, Human herpesvirus 5
ucccauagccugucuaacuagccuucccgugagaguuuaugaacauguaucucaccagaaugcuaguuuguagaggcuaugcggg

SEQ ID NO: 4204187 - RNA, 65 nt, Human herpesvirus 5
ucuuccuccccaacuacuacuaccguguguacucccaccggcgagcugacgaguggcggaggaga

SEQ ID NO: 4204188 - RNA, 66 nt, Human herpesvirus 5
ugaacgcuuucgucguguuuuucaugcagcuuuuacagaccaugacaagccugacgagagcguuca

SEQ ID NO: 4204189 - RNA, 88 nt, Human herpesvirus 5
ugaacuggacgcugcgucgcagucagacccacuaccuggaggagauggccuuacagguggagauucuaaagccacgcggcguacguca

SEQ ID NO: 4204190 - RNA, 77 nt, Human herpesvirus 5
ugacguugaccguuguggggauuuuugacgggcaacacuuuuuuaccuaucacguuaauuccagcgauaaagcguca

SEQ ID NO: 4204191 - RNA, 61 nt, Human herpesvirus 5
ugaugcugugcaauaaaauuuucacaggccgcguuuuguucgauuugaugcgcuagcguca

SEQ ID NO: 4204192 - RNA, 100 nt, Human herpesvirus 5
ugucucuguggcggcgcuguccgcacagagguaacaacguguucauagcacgcuguuuuacuuuugucgggcucccagccucuguuagguugcggagaua

SEQ ID NO: 4204193 - RNA, 78 nt, Human herpesvirus 5
uguucaugcagcucgucuuuuuagccgugaccaucuacuaccugguaugcuggaucaagaucagcaugcgcaaggaca

SEQ ID NO: 4204194 - RNA, 80 nt, Human herpesvirus 6
auccgauuccguuugcguggcuagaucgagacaaaguugagcgucuuacagauuuucucagcaauuuggaaagacuggau

SEQ ID NO: 4204195 - RNA, 67 nt, Human herpesvirus 6
cccuucucuguuuggagacauacuguacuaaauccccgugguaccuuuguuuugcagagaaaaacgg

SEQ ID NO: 4204196 - RNA, 94 nt, Human herpesvirus 6
ccgcuaucuauaaucaucuccuccguuaugucuuucagaucaacaucaaguucccuggaaugaugaacgguaagcgagagauagggaugguugg

SEQ ID NO: 4204197 - RNA, 75 nt, Human herpesvirus 6
ccggcaucucuaucuacaaaauagaauuuaacgauccuuuucucacagucuuuuugcguaacguaguguugccgg

SEQ ID NO: 4204198 - RNA, 70 nt, Human herpesvirus 6
ccggcggucgaugucuggcguguugucgugcgugcuccgcgcgugugcgugcgccggacucugcugcugg

SEQ ID NO: 4204199 - RNA, 59 nt, Human herpesvirus 6
gacgugguggauaauucuucagaaacucuguuucucgguaaaaauuugguccaucaguc

SEQ ID NO: 4204200 - RNA, 88 nt, Human herpesvirus 6
gaucguaaggcaguaaagccgaugacggccuccggccccagagacgacucgcggaguggaguccaguuauuguauuuuuuuugugauu

SEQ ID NO: 4204201 - RNA, 90 nt, Human herpesvirus 6
gaugguuaaggaaaaagcgcugauuuuugagauuaaauucaaauauaaauauuuacgggauaaagaagaucacuuuguuucugaacuauu

SEQ ID NO: 4204202 - RNA, 74 nt, Human herpesvirus 6
gcaguguacaaaugauuuaauuucgcuucuuggcccuaaaguagcucagcgagucauaauucauuuuaaacugc

SEQ ID NO: 4204203 - RNA, 79 nt, Human herpesvirus 6
gcaucgguuguguuagcuuugcgauauucaaaguaaucucguugggauagcagaucgcaaaauugauacaaacgugagc

SEQ ID NO: 4204204 - RNA, 57 nt, Human herpesvirus 6
ggucgcguccgugugaacuggcacgagugagaugacuuguuuuuaucggggcggauc

SEQ ID NO: 4204205 - RNA, 72 nt, Human herpesvirus 6
gugacggugcuccgaucagggggggaaaaggucaagcgaagauaacauucuuucgugauuggaaaccgucgc

SEQ ID NO: 4204206 - RNA, 78 nt, Human herpesvirus 6
gugucugaccagguuguaccuaucgucaaauguaucgagaaauggaauguggucggugguuaguuuuuggguagacau

SEQ ID NO: 4204207 - RNA, 76 nt, Human herpesvirus 6
guuuguuggaagguaucuuucauaaguuuggcggguugccauagcugggugucgauacauauauuucucauuaaau

SEQ ID NO: 4204208 - RNA, 80 nt, Human herpesvirus 6
uaccuccggcggucgaugucuggcguguugucgugcgugcuccgcgcgugugcgugcgccggacucugcugcugggugug

SEQ ID NO: 4204209 - RNA, 99 nt, Human herpesvirus 6
ucugcaaagacauccgauuccguuugcguggcuagaucgagacaaaguugagcgucuuacagauuuucucagcaauuuggaaagacuggauaauguaga

SEQ ID NO: 4204210 - RNA, 77 nt, Human herpesvirus 6
ugugaucaagugguguuuagcuguguguuauaaggaagauucagagugaauuccuggacauggugaaacuugacaca

SEQ ID NO: 4204211 - RNA, 58 nt, Human herpesvirus 6
uuaagcagccgcgaacucguuaauaguuacuuugauguuaacucaggugguggcuugg

SEQ ID NO: 4204212 - RNA, 66 nt, Human herpesvirus 6
uuaggauucuauguggagccgucugaccugugccggugacgcuuuuuuuccacguaagauuuuuga

SEQ ID NO: 4204213 - RNA, 86 nt, Human herpesvirus 6
uucgauauugucaaagcuguuaaauguaaauggaauauuagaacaucaagaauauuuaaauacggaauagcuuuuaaauaggugaa

SEQ ID NO: 4204214 - RNA, 57 nt, Human herpesvirus 6
uugcuucguuaacaauaauacgcaguugucuggcagcuacguuuuuuuagcggguaa

SEQ ID NO: 4204215 - RNA, 121 nt, Human herpesvirus 6
uuuuggaaagcgauuaaaaauugugcguauagaugaggagggggauuugaguggaaaugucguuuugacauuuaaucacgagucuccuuuauuauuucacacuggugguggcaugacaaag

SEQ ID NO: 4204216 - RNA, 129 nt, Human herpesvirus 6
aacguuaauguuuacggauucgaucgagaaucuuccuuuucaguauagacauuuugugauuccuucggggacagugauuagaauguuugggagaacugaggacggugagaagaucugcgugaacguguu

SEQ ID NO: 4204217 - RNA, 70 nt, Human herpesvirus 6
aguaaauauuuaucugcauguauucggaccaauaagacaggucuuugcuuugccaguauaacuguuuauu

SEQ ID NO: 4204218 - RNA, 110 nt, Human herpesvirus 6
aguguauccggcucauauuugccugccgacagaugugugucuuccgaugagaguggauuguaucgagucuuuauauuuucgguguguauuuuuuaagagugggaugcauu

SEQ ID NO: 4204219 - RNA, 129 nt, Human herpesvirus 6
auguucugugcuuuuuuuauacggucagagaccacagacaaaaauaaggcaacgcccaccauaacguuuaugguuucuuguuguuuuguuuggguuaaacgccucuucuaucgugucggccggauccau

SEQ ID NO: 4204220 - RNA, 66 nt, Human herpesvirus 6
cacuccgagaacucgagccauaguuuucucagguugacaaaacuguccacagaguucuuuguugug

SEQ ID NO: 4204221 - RNA, 56 nt, Human herpesvirus 6
ccgcauucguaucgcucggcuacccguccugugucgaaaucgcggaugaauugcgg

SEQ ID NO: 4204222 - RNA, 94 nt, Human herpesvirus 6
ccgucaccucgcgcggcgucucacgccgugugugcggcgggcggcugugacuugccgacgcacgacgcggacggagaugccgaugagggaacgg

SEQ ID NO: 4204223 - RNA, 129 nt, Human herpesvirus 6
aauuauaaaauuggcccuucggggauuuuagauuuuaauguuaaauuuccaccuaaugcgcaauugaauacgaacgguguggauuuacuacaggauaaaacuucgaucgggagucccaguagcgguauu

SEQ ID NO: 4204224 - RNA, 79 nt, Human herpesvirus 6
acagaucuauuagauggcgauuugaagaaggguaauauguaaaacaguaguccauuuucaacagccugucuagaaaugu

SEQ ID NO: 4204225 - RNA, 66 nt, Human herpesvirus 6
agagcuuagucaguuuuggaauguuuuucguguuuucgaccguuucguugcaaaugacuuuguuuu

SEQ ID NO: 4204226 - RNA, 74 nt, Human herpesvirus 6
aucaaaguuuacgauggcucguccaaaggaagugguaacauuuauagguuuuggcgacuguuugaaauauugau

SEQ ID NO: 4204227 - RNA, 55 nt, Human herpesvirus 6
aucgauaauccucgggccaggguaaagcuaacguggcgcccuggcgauuuucgau

SEQ ID NO: 4204228 - RNA, 74 nt, Human herpesvirus 6
aucuagauaggugccuauugcugcuaugccugugccagaagcacggcgguugccuguauaggcagggucuaggu

SEQ ID NO: 4204229 - RNA, 56 nt, Human herpesvirus 6
caaccgcgguacccacugaucuuuaucuuuaugaagaaaaacaggaacugcgguug

SEQ ID NO: 4204230 - RNA, 78 nt, Human herpesvirus 6
cagaccgcugcuggacgaacugugcggagagggcggauggcuucccuucgcguuucucuccacaucuccgcacgucug

SEQ ID NO: 4204231 - RNA, 56 nt, Human herpesvirus 6
cggugugucauuggagaaauacgagucugacaucaucgcuccgguaugacaccccg

SEQ ID NO: 4204232 - RNA, 65 nt, Human herpesvirus 6
cgugaguauguaaauuuggcagguuacacucccgugugcaacaugcagaauaucaaaaacucaug

SEQ ID NO: 4204233 - RNA, 76 nt, Human herpesvirus 6
cuagaaccagacugggaaccgcggcagcauuccacccaguauguuuacgugguucauguuuacaaggagguuuuag

SEQ ID NO: 4204234 - RNA, 93 nt, Human herpesvirus 6
cuccguuaccuccggcggucgaugucuggcguguugucgugcgugcuccgcgcgugugcgugcgccggacucugcugcuggguguguaugggg

SEQ ID NO: 4204235 - RNA, 65 nt, Human herpesvirus 6
gacaccagcugaugugcguaauagaaccucuucagaccuuuacguagaaaaucgucaaugguguc

SEQ ID NO: 4204236 - RNA, 67 nt, Human herpesvirus 6
gauugcgaggagacggagacggaggagucgacauccggugauuccguccucgucuguuaauguaguu

SEQ ID NO: 4204237 - RNA, 61 nt, Human herpesvirus 6
gcggcggauggagcccgcucggucucgcacuuccgcgauacccagcgggcuccgucgccgc

SEQ ID NO: 4204238 - RNA, 88 nt, Human herpesvirus 6
gcguguggaccgugcucggggagggcggauaguaggagugggucgaucguuucgucccgcuggguuuuccuuguuacgguacgcgcgc

SEQ ID NO: 4204239 - RNA, 60 nt, Human herpesvirus 6
gcuuagucaguuuuggaauguuuuucguguuuucgaccguuucguugcaaaugacuuugu

SEQ ID NO: 4204240 - RNA, 120 nt, Human herpesvirus 6
ggaucagaaauaaagucuugcaguuugauguuaaugaagucugggauguagagccuggaaucugaaacgaaggcuguccauuucguaucgaaugaaaguuuuguuauaugguucugaucc

SEQ ID NO: 4204241 - RNA, 55 nt, Human herpesvirus 6
ggcaccgugccaggccaccgugggucccagacgguggcacgucgcgcgcgauguc

SEQ ID NO: 4204242 - RNA, 78 nt, Human herpesvirus 6
gggaccgagcggcggauggagcccgcucggucucgcacuuccgcgauacccagcgggcuccgucgccgcuucggaccc

SEQ ID NO: 4204243 - RNA, 58 nt, Human herpesvirus 6
gggugucuaaacgagucuggaguuuguuguuguacuucaagcucggaguuuggcaucu

SEQ ID NO: 4204244 - RNA, 68 nt, Human herpesvirus 6
ggguguuguuuagcguggagauguuugguaguucaaucgauucgguuaugaaacgcggaacgaugccu

SEQ ID NO: 4204245 - RNA, 114 nt, Human herpesvirus 6
ggugggggcgugucggaccucggguccgaagcggcgacggagcccgcuggguaucgcggaagugcgagaccgagcgggcuccauccgccgcucgguccccggcguguuccccuc

SEQ ID NO: 4204246 - RNA, 64 nt, Human herpesvirus 6
gucugcucggugggggcgcgucggcgugucuguguacguucgcgcgcguguuugcaucagugac

SEQ ID NO: 4204247 - RNA, 72 nt, Human herpesvirus 6
gucuuugaaggacuaucugagacaguccauuucuaaagauuuggaggugagacaucgagauucuuuaaagau

SEQ ID NO: 4204248 - RNA, 86 nt, Human herpesvirus 6
guuuaaguuuucacgugcacgagaucuguucgaaaaaguacuccgccucggcguacauauaaacagauuuuaugccggaaaaaaac

SEQ ID NO: 4204249 - RNA, 105 nt, Human herpesvirus 6
ucuccuuagaaauugaaccgugguuuaaaucuaauauucaucggcugaauacuuauucucaguucgcggaucaggauuuaucgaaaacgguucaauuggaggaga

SEQ ID NO: 4204250 - RNA, 80 nt, Human herpesvirus 6
ucugacauuuuccgauagggaaacucuauucaugcuagccgaaauagcgaauaucaucccuaccgaugaacgcaugcaga

SEQ ID NO: 4204251 - RNA, 99 nt, Human herpesvirus 6
ugcacacacgauaaaaugguauaguaaucauucagguuuacccgaggugacguuuuccccgaguaaaucgaacgauacuuacauuucaccgucuaggca

SEQ ID NO: 4204252 - RNA, 72 nt, Human herpesvirus 6
uggcuaggguuaugacuagggguauggcuaggguuaguacuuuggcuacgguuaggguuaguacuuuggcua

SEQ ID NO: 4204253 - RNA, 129 nt, Human herpesvirus 6
cgagaacaaaaugaggggaacacgccggggaccgagcggcggauggagcccgcucggucucgcacuuccgcgauacccagcgggcuccgucgccgcuucggacccgagguccgacacgcccccaccucg

SEQ ID NO: 4204254 - RNA, 58 nt, Human herpesvirus 6
cuagguuuaguguuagggauaguuuuaugguuaguguuaucguugguguuagaguuag

SEQ ID NO: 4204255 - RNA, 69 nt, Human herpesvirus 6
cuauauaugcaagccaugacaagaaagguauugauggaagaguaagcaacgguuauggaacguauguag

SEQ ID NO: 4204256 - RNA, 85 nt, Human herpesvirus 6
cugcagcgaugacaccagcugaugugcguaauagaaccucuucagaccuuuacguagaaaaucgucaauggugucaccgacgcgg

SEQ ID NO: 4204257 - RNA, 110 nt, Human herpesvirus 6
cuugugguggguuucaugcuuucaaauaguuguguuauaaaaggcuugaaaacggcaacugcguccuuuuuaauuucgaguauugugaaagaauuguucgaaaccgcgag

SEQ ID NO: 4204258 - RNA, 69 nt, Human herpesvirus 6
gaacaaauucgguguuuuuaauguuccgugaaaaaguuuacagcgcauucgacacauggaauuuacguc

SEQ ID NO: 4204259 - RNA, 90 nt, Human herpesvirus 6
gaacggagucucaucguaaucuuuguaggcaggaacggaaaaaccgauucucagagcuucccaacacuuuaagauaaacugacucuuuuc

SEQ ID NO: 4204260 - RNA, 78 nt, Human herpesvirus 6
gagcaguguacaaaugauuuaauuucgcuucuuggcccuaaaguagcucagcgagucauaauucauuuuaaacugcuu

SEQ ID NO: 4204261 - RNA, 55 nt, Human herpesvirus 6
gccgcagaguugcaagaaauguguaaguaucaguguuucgugucaguucuguggu

SEQ ID NO: 4204262 - RNA, 79 nt, Human herpesvirus 6
gcuaucuucggcaaaaaguuuucguuuaacaccuuuuccgagucccucauguuuucuuaacuuuuuccugacugguggu

SEQ ID NO: 4204263 - RNA, 114 nt, Human herpesvirus 6
ggagcagccagucgaagcgggcacgggcucgcgcgugggccagucucgccucguugcgccggaccgagaugcguccgcccguccucugugugugucgcgucgacauggcuuucc

SEQ ID NO: 4204264 - RNA, 60 nt, Human herpesvirus 6
ggccacacgucgugcguuuugucuucagauaugucuguaguccaaaguucauugaugucc

SEQ ID NO: 4204265 - RNA, 58 nt, Human herpesvirus 6
gggacaccuaacaauuucuuucaucuguuucaucggagaaaaguaacacaggucuccc

SEQ ID NO: 4204266 - RNA, 108 nt, Human herpesvirus 6
ggggaacacgccggggaccgagcggcggauggagcccgcucggucucgcacuuccgcgauacccagcgggcuccgucgccgcuucggacccgagguccgacacgcccc

SEQ ID NO: 4204267 - RNA, 78 nt, Human herpesvirus 6
ggguccgaagcggcgacggagcccgcuggguaucgcggaagugcgagaccgagcgggcuccauccgccgcucgguccc

SEQ ID NO: 4204268 - RNA, 89 nt, Human herpesvirus 6
gggugcucauggaucaggucggcaggguguacgcggccagucucgacgggggagccguggugcgucucuccgauaguuucagggcguuu

SEQ ID NO: 4204269 - RNA, 67 nt, Human herpesvirus 6
gguaaaauggcugugcuaucugauuuuggucugggguguggaaaaaagucaccuguauagauuuauu

SEQ ID NO: 4204270 - RNA, 72 nt, Human herpesvirus 6
ggucaugaucugcuugauauuuuccgagaugagguugagaaugauuuuaagucguugugucaugauuaugcc

SEQ ID NO: 4204271 - RNA, 80 nt, Human herpesvirus 6
guaguccaugaugcucugauguagauauuuuaaaaauagguaaucuuguuuggaagcugccaucaguucacauaggagac

SEQ ID NO: 4204272 - RNA, 130 nt, Human herpesvirus 6
uagauugugagguguuugaagucgaagucguuaauaucguauuuagaauuaaggaauugguauuuaggauacuuuuuccguauuuuuagucgcgaugagguuaugacgaugguuucguuugcauaguuua

SEQ ID NO: 4204273 - RNA, 68 nt, Human herpesvirus 6
uccaccgaggugugauuuuagaagguagaguuugaacacuacgugucucagucgcacacgguacagga

SEQ ID NO: 4204274 - RNA, 96 nt, Human herpesvirus 6
uccgucaccucgcgcggcgucucacgccgugugugcggcgggcggcugugacuugccgacgcacgacgcggacggagaugccgaugagggaacgga

SEQ ID NO: 4204275 - RNA, 96 nt, Human herpesvirus 6
uccguucccucaucggcaucuccguccgcgucgugcgucggcaagucacagccgcccgccgcacacacggcgugagacgccgcgcgaggugacgga

SEQ ID NO: 4204276 - RNA, 80 nt, Human herpesvirus 6
uguaaauacuaaauguuaugaagaaguuaacuauggaguccuugucaguuuauaucuucguaaugggagucugcuuuaca

SEQ ID NO: 4204277 - RNA, 56 nt, Human herpesvirus 6
uguggaaaaaaacgcugguggguagguuguuuuccauggugucguuuaauuucaca

SEQ ID NO: 4204278 - RNA, 64 nt, Human herpesvirus 6
uuguguuagcuuugcgauauucaaaguaaucucguugggauagcagaucgcaaaauugauacaa

SEQ ID NO: 4204279 - RNA, 75 nt, Human herpesvirus 6
uuuucacgugcacgagaucuguucgaaaaaguacuccgccucggcguacauauaaacagauuuuaugccggaaaa

SEQ ID NO: 4204280 - RNA, 91 nt, Human herpesvirus 6
aaggagaucuauggcgacgcggcgucuccgacgagugugcucuugaaacacuuuuuguccgaucacaucuuugucgcguacgcuucuucuu

SEQ ID NO: 4204281 - RNA, 56 nt, Human herpesvirus 6
aaucuggguuccugcuuaguuacauguucccaaagacuuagcagauauucuagauu

SEQ ID NO: 4204282 - RNA, 90 nt, Human herpesvirus 6
agccggaaaaagauguucgccguuuacuauuguaaaauccacaagggaauauaaacauguauuguaaaucgccacgucaaaaaccgugcu

SEQ ID NO: 4204283 - RNA, 85 nt, Human herpesvirus 6
aucggaaauggcuaauaauuccauaaaugucaaggagucgaauguuuauggccaugugggguguguuaaugacgccauuuccgau

SEQ ID NO: 4204284 - RNA, 119 nt, Human herpesvirus 6
auguuuacggauucgaucgagaaucuuccuuuucaguauagacauuuugugauuccuucggggacagugauuagaauguuugggagaacugaggacggugagaagaucugcgugaacgu

SEQ ID NO: 4204285 - RNA, 130 nt, Human herpesvirus 6
cacacacgccgacuccguccgcagaggcggcgaccgcagcggcagcggaaacuguaacggccacguucuccgaacagcgacaguaacggcggcggcggcgguugucgccgucacgguagucguggcggag

SEQ ID NO: 4204286 - RNA, 67 nt, Human herpesvirus 6
ccgaauuaaacgcuuguuucacguuugguauaaaugccaauuuugagcaauauaagauagaauuugg

SEQ ID NO: 4204287 - RNA, 70 nt, Human herpesvirus 6
cgguuguguuagcuuugcgauauucaaaguaaucucguugggauagcagaucgcaaaauugauacaaacg

SEQ ID NO: 4204288 - RNA, 74 nt, Human herpesvirus 6
gacgauucucauuauaacgcagacauccaauuuuuaaaaaaucggacauguugcgagcuaugaagagaaggcuc

SEQ ID NO: 4204289 - RNA, 72 nt, Human herpesvirus 6
gacguuuugaauucucauuugaaagcgauagaggaugcuuugcuguuuacgaaugauggggagguaaacguc

SEQ ID NO: 4204290 - RNA, 64 nt, Human herpesvirus 6
uuagauggcgauuugaagaaggguaauauguaaaacaguaguccauuuucaacagccugucuag

SEQ ID NO: 4204291 - RNA, 61 nt, Human herpesvirus 6
uucggacuucauguuaugaauacgcgcacuuuuccgcggagguucauuucugacgucugaa

SEQ ID NO: 4204292 - RNA, 75 nt, Human herpesvirus 6
uugguggugauugcugagacugaaugggacgucgauggguucuuuaccgguaauuggcaguuuuaugaucgcuag

SEQ ID NO: 4204293 - RNA, 116 nt, Human herpesvirus 6
gaggugggggcgugucggaccucggguccgaagcggcgacggagcccgcuggguaucgcggaagugcgagaccgagcgggcuccauccgccgcucgguccccggcguguuccccuc

SEQ ID NO: 4204294 - RNA, 66 nt, Human herpesvirus 6
gauugauaaguuuccgacaugcccaacgucgacauccguccgaagcgcauggagauuuuuccaauc

SEQ ID NO: 4204295 - RNA, 87 nt, Human herpesvirus 6
gccggggaccgagcggcggauggagcccgcucggucucgcacuuccgcgauacccagcgggcuccgucgccgcuucggacccgaggu

SEQ ID NO: 4204296 - RNA, 57 nt, Human herpesvirus 6
gcgagcauaguuuaguggguauuuguacggcacgaacggcaccauuaauauguucgc

SEQ ID NO: 4204297 - RNA, 129 nt, Human herpesvirus 6
gggacgugcacgggcuccguuaccuccggcggucgaugucuggcguguugucgugcgugcuccgcgcgugugcgugcgccggacucugcugcuggguguguaugggggcgauaugcggagguugucagc

SEQ ID NO: 4204298 - RNA, 108 nt, Human herpesvirus 6
gucgccuccgucaccucgcgcggcgucucacgccgugugugcggcgggcggcugugacuugccgacgcacgacgcggacggagaugccgaugagggaacggacgugac

SEQ ID NO: 4204299 - RNA, 68 nt, Human herpesvirus 6
gucgcucaugcggacagucaaacauucauuaacacgcaggauguugcauucucucacagcaugaugac

SEQ ID NO: 4204300 - RNA, 65 nt, Human herpesvirus 6
gucugccuauaucgaauuaucuuugaagccuuuguaggucucggguuuaguucgauuauguugac

SEQ ID NO: 4204301 - RNA, 60 nt, Human herpesvirus 6
uaucagaugacgcaucaacuuuacauaaaccccgugcagauuauaugcuacguacugaua

SEQ ID NO: 4204302 - RNA, 82 nt, Human herpesvirus 6
uccuccucucaggccuccggcuuccucuccgucccccgagcgggagcggcgaggcggccggagagccgggguacgaggagga

SEQ ID NO: 4204303 - RNA, 105 nt, Human herpesvirus 6
ugaguggacgcugacauucuaguaugcuuuaccucuuuagugacuucagugauugaguaugaugaauuacuagaugguaaagcguuguuaguuauguguacuuca

SEQ ID NO: 4204304 - RNA, 80 nt, Human herpesvirus 6
uugggaaacugauacuguucaaguccuugaguuuacagauacacaugagggagaugaggaguauuuuaaagauuuucuaa

SEQ ID NO: 4204305 - RNA, 129 nt, Human herpesvirus 6B
aaacugaaaucgugcacagauacuacuacugacauuucugaagaugaucuccuuuugugugcggccaggaggucgagugacaucuuacaaauaaugcaauuaguguuuacggugcaugugcaauuuuuu

SEQ ID NO: 4204306 - RNA, 86 nt, Human herpesvirus 6B
aggccgggcguauaggaaggguggcgcgucgcgaagucccgccucauagguggggcauucgaggccgcccucuauacuuucgguuu

SEQ ID NO: 4204307 - RNA, 94 nt, Human herpesvirus 6B
ccacugucgucaagacgccuaguguuaaagaugcugacgggggcacaucuguugcgguuucggaaaaagaggaggguauggcugacgucagugg

SEQ ID NO: 4204308 - RNA, 95 nt, Human herpesvirus 6B
cccacggcuuugcucggagucccggagaucuaaugggggagaugaacggagaucugggagacgagggagagacgggagagggcggagacaacggg

SEQ ID NO: 4204309 - RNA, 55 nt, Human herpesvirus 6B
ccgguuuauuucagcucuuuguuuguuuacauucaguuggccaaaggagggccgg

SEQ ID NO: 4204310 - RNA, 72 nt, Human herpesvirus 6B
gacguuuugaauucucauuuaaaagcgauagaggaugcuuugcuguuuacgaaugauggggagguaaacguc

SEQ ID NO: 4204311 - RNA, 96 nt, Human herpesvirus 6B
gcucucccucuucccucuuccuucucguaccccggcuuucucgccgccucgccgcucccgcucgggggacggagaggaagccggagcccugagagc

SEQ ID NO: 4204312 - RNA, 66 nt, Human herpesvirus 6B
gggaucuugaugcguauucucacucaaugguugucuaugugugacguccgcaucaugguauagucc

SEQ ID NO: 4204313 - RNA, 106 nt, Human herpesvirus 6B
gguaauaucccucguuguuugguuaacguuagauguuuuguuagaggagaacacuuuugcacagcagacaauguaauaaauaauaaucaggaggaauaagauagcc

SEQ ID NO: 4204314 - RNA, 97 nt, Human herpesvirus 6B
ucgccccgaaaccgcaacgcggcagagucggcgccacacccccgucccccgaguucgcgaugggcuggcgccgacccugccgcggcaacgaaggcga

SEQ ID NO: 4204315 - RNA, 74 nt, Human herpesvirus 6B
ugaugucgcucgugugaacuuugugcacguuuucugauucgauaggaagugcgggaguuucgccgaguuuguca

SEQ ID NO: 4204316 - RNA, 72 nt, Human herpesvirus 6B
ugcacuugucauuucggaagguagcgucagauucgauauauaaugucuuugaaggacuaucugagacaguca

SEQ ID NO: 4204317 - RNA, 74 nt, Human herpesvirus 6B
ugugugugacuguguacauucgccgauuuuauuucucaucggguuaaaggcagggagggauacggucacgcgca

SEQ ID NO: 4204318 - RNA, 65 nt, Human herpesvirus 6B
uguugaaagaguuguauauggugauguguucucgaaggagcaucgguuguguuagcuucgcgaua

SEQ ID NO: 4204319 - RNA, 66 nt, Human herpesvirus 6B
uuguucgcuuuugcaaucugagcaugacuggguuuucuaguaaacauuugauucaguggcggagga

SEQ ID NO: 4204320 - RNA, 79 nt, Human herpesvirus 6B
aaauaguugugaaaauggcugaauaauauuagaguccucuauuucuguuuuauuuguauuuucauuggaaaaacuguuu

SEQ ID NO: 4204321 - RNA, 84 nt, Human herpesvirus 6B
aacagcauucagaccuuagcggccaacuuagauuguaucguuacugcaacgacaucuaucgccgcucagaauuugagcguuguu

SEQ ID NO: 4204322 - RNA, 82 nt, Human herpesvirus 6B
aauguccgcagucucuugcggggcuucuaccguaguccguagggacugcgaggacacguugcgcgacggagaugcgggaguu

SEQ ID NO: 4204323 - RNA, 56 nt, Human herpesvirus 6B
aggguggcgcgucgcgaagucccgccucauagguggggcauucgaggccgcccucu

SEQ ID NO: 4204324 - RNA, 64 nt, Human herpesvirus 6B
aguugcauggugauguguuagcuaucucgaaaugcauagaaguuaaucaaucauccguucagcu

SEQ ID NO: 4204325 - RNA, 55 nt, Human herpesvirus 6B
cccauguaugcauuaacucugggugaguuuuaucacuuucacacgcauagauggg

SEQ ID NO: 4204326 - RNA, 93 nt, Human herpesvirus 6B
cuggcguguggaccgugcccagggaggacggauagcaggagucggucgaucgucucgcuccgcuugguuuuccgugucacggcgcgcgcauag

SEQ ID NO: 4204327 - RNA, 100 nt, Human herpesvirus 6B
cuuuuaaugcgguuuuuacgaacucaacuuucaauaagauuccuuugacgacgauaagucggcuuuuuguucaguugauuauaggaggacacgcuaaagg

SEQ ID NO: 4204328 - RNA, 78 nt, Human herpesvirus 6B
gagcaguguacaaaugauuuaauuucgcuucuugguccuaaaguagcucagcgagucauaauucauuuuaaacugcuu

SEQ ID NO: 4204329 - RNA, 62 nt, Human herpesvirus 6B
gagugaccucugguggugaauauagagacuugcuaaaugguguauucucauuaguguuauuc

SEQ ID NO: 4204330 - RNA, 76 nt, Human herpesvirus 6B
gauauucacuguaguucauggauuaccaaugucccacgaggcauuugguuggcaaacacugagcuacaagauuauc

SEQ ID NO: 4204331 - RNA, 73 nt, Human herpesvirus 6B
gcaacgcggcagagucggcgccacacccccgucccccgaguucgcgaugggcuggcgccgacccugccgcggc

SEQ ID NO: 4204332 - RNA, 57 nt, Human herpesvirus 6B
guaaccgcgguacacacugaccuuuaacuuuaugagaaaaacaggaacugcgguugc

SEQ ID NO: 4204333 - RNA, 62 nt, Human herpesvirus 6B
guuuucuucuuuuguuuugcauucguccggcaaacuguaaucguaauacaacagaagcaaau

SEQ ID NO: 4204334 - RNA, 70 nt, Human herpesvirus 6B
uagguggguguggaguauggugucugaaaaaugguggcgaucuguauaucuaugcuuuuguacucgcuua

SEQ ID NO: 4204335 - RNA, 65 nt, Human herpesvirus 6B
ucagaguaugaauucguuacaaucucuguguguguugugcgcuaggcuuaaugaaugugcuuugg

SEQ ID NO: 4204336 - RNA, 106 nt, Human herpesvirus 6B
ugguacuucucacuucgauauugucaaagcuguuaaauguaaauggaauauuagaacaucaagaauauuuaaauacggaauagcuuuuaaauaggugaaauggcua

SEQ ID NO: 4204337 - RNA, 64 nt, Human herpesvirus 6B
uuauugaaaugggauaugauguguuuucgauguauuucaucgcauacgucucccaguucguuaa

SEQ ID NO: 4204338 - RNA, 68 nt, Human herpesvirus 6B
uugaaacggagggcggaaagcgagucuugugugaaaguauuguacuucauuuugcguuuauguuucaa

SEQ ID NO: 4204339 - RNA, 60 nt, Human herpesvirus 6B
uugcgcgacggagaugcgggaguugacacuucgugaucccgcccucgucuguugcuguag

SEQ ID NO: 4204340 - RNA, 58 nt, Human herpesvirus 6B
accgguaauugugaaacuuuaauaguuaauucauguuuugguuccacuugugcacggu

SEQ ID NO: 4204341 - RNA, 100 nt, Human herpesvirus 6B
augcaaauagcacucacggcacuuuauagaaaaugucucacgauaaugcacaccaauuuucugaauguuuucauguaauuuaauaaacauuuauuuguau

SEQ ID NO: 4204342 - RNA, 93 nt, Human herpesvirus 6B
ccaugugugagcguuaagaauuggugucauucgugguauuucugugugguugaucucuccgugaguggacgccgacauucuauuuugcuuugg

SEQ ID NO: 4204343 - RNA, 92 nt, Human herpesvirus 6B
ccugcuccugcucucagggcuccggcuuccucuccgucccccgagcgggagcggcgaggcggcgagaaagccgggguacgagaaggaagagg

SEQ ID NO: 4204344 - RNA, 67 nt, Human herpesvirus 6B
gacguccgucgaacaacgcguuggcgaaauucaccagagguucgccgcaaaguugcucguugauguu

SEQ ID NO: 4204345 - RNA, 116 nt, Human herpesvirus 6B
gagguccugcuggaggcucugcuggaggcucugcuggaggcucugcuggaggcucugcuggaggcucugcuggaggcucugcuggaggcucugcuggaggcucugucagagaccuc

SEQ ID NO: 4204346 - RNA, 61 nt, Human herpesvirus 6B
gaguggccaagcguccccggggagaugucuacccggggccgaauacguccaauguccucuc

SEQ ID NO: 4204347 - RNA, 106 nt, Human herpesvirus 6B
gcacauugugugugacuguguacauucgccgauuuuauuucucaucggguuaaaggcagggagggauacggucacgcgcacauauacacaccccacacauacacgc

SEQ ID NO: 4204348 - RNA, 64 nt, Human herpesvirus 6B
gcuuucaagcagucccgaucuaugcgacucaccgugucgcguuggcaucgggcgcugcuauagc

SEQ ID NO: 4204349 - RNA, 85 nt, Human herpesvirus 6B
gggacuugauauauccgagugucguuuuuuguauaaaaguuaaaaguuauaaagcccgggcgaacaauuggauuuucagaguuuc

SEQ ID NO: 4204350 - RNA, 77 nt, Human herpesvirus 6B
gggcggcuggcuucccuuugcguuucucacggcaucuccgcacgucugucugauccuaacggagggaggccccgucc

SEQ ID NO: 4204351 - RNA, 58 nt, Human herpesvirus 6B
gggugucuaaaugagucuggaguuuguuguuguacuucaaauucggaguuuggcaucu

SEQ ID NO: 4204352 - RNA, 73 nt, Human herpesvirus 6B
ugggugcaguggcuaagaaggcugucaguucuucgggagauguaaugacggcuguuuuugcucucuguaucca

SEQ ID NO: 4204353 - RNA, 64 nt, Human herpesvirus 6B
uguaagugucguucuaucuacucggggaaaaugucaccacggguaaacuugaaugauuaauaca

SEQ ID NO: 4204354 - RNA, 77 nt, Human herpesvirus 6B
uuuaaguugcaaaacgaucucgauucugugcagucuccguuuaggcugccaaaugcugaucugucucgcgauuuaga

SEQ ID NO: 4204355 - RNA, 58 nt, Human herpesvirus 6B
uuucggaugucuacgagagcaugccguaucacgggcauguuauugggagcauuggaaa

SEQ ID NO: 4204356 - RNA, 85 nt, Human herpesvirus 6B
aaaacgggccaagauaucuacagauggaaacguuuauaucggauuuauuccgguaugaaugucaucgagauaaucguuauguuuu

SEQ ID NO: 4204357 - RNA, 62 nt, Human herpesvirus 6B
agaccgcauucguaucgcucggcuacacguucugugucgaaaucgcggaugaauugcgguuu

SEQ ID NO: 4204358 - RNA, 99 nt, Human herpesvirus 6B
aggcagcuaaaauccgaaacucuuccaaauuguguuuuuuugaucugaagguucuuugaaucuauuuugagaaaaguuacuugugaaaacuguugcgcu

SEQ ID NO: 4204359 - RNA, 84 nt, Human herpesvirus 6B
cagugaaagagugcucgauuccagaaucucuaaagaauauauuuaaagaacuggaaagaagcaucccgaauuuuucccccccug

SEQ ID NO: 4204360 - RNA, 85 nt, Human herpesvirus 6B
cccaauuuugguacaauuuuuacaagucgaucuuugguuacauuugguuugacauuagagaaauuugugagcuuggcuaauaggg

SEQ ID NO: 4204361 - RNA, 71 nt, Human herpesvirus 6B
gaaguuuaccuagagauuacaagguacacaauacacaguagaccgaguaucacguaucucugguaaauguc

SEQ ID NO: 4204362 - RNA, 69 nt, Human herpesvirus 6B
gaaucugaagcguuuucacgaugugugucaauacccugcucccaauaucucgcaaauaccgaucaguuc

SEQ ID NO: 4204363 - RNA, 64 nt, Human herpesvirus 6B
gaguauuggacucacuccuguuccucagcauaaggaacugcaggaagagggaguccaacaacuc

SEQ ID NO: 4204364 - RNA, 70 nt, Human herpesvirus 6B
gccggccucugcugcuggguguguaugggggugauaugcggugacugucagcggugguggcggaggcggu

SEQ ID NO: 4204365 - RNA, 67 nt, Human herpesvirus 6B
gcgugugggauuugccagacuuuuugcggacugcgguuaugagaagauuggaaaaauauccaugcgc

SEQ ID NO: 4204366 - RNA, 71 nt, Human herpesvirus 6B
ggaugacaccggcuauaaaagccgaaaugacacucucgucuucguuggccgucuuuauggccacuuuaucu

SEQ ID NO: 4204367 - RNA, 62 nt, Human herpesvirus 6B
uaaauucgguguuuuugauguuccgugaaaaaguuuacagcgcauucgacauauggaauuua

SEQ ID NO: 4204368 - RNA, 73 nt, Human herpesvirus 6B
uaaguugcaaaacgaucucgauucugugcagucuccguuuaggcugccaaaugcugaucugucucgcgauuua

SEQ ID NO: 4204369 - RNA, 69 nt, Human herpesvirus 6B
ucugggaucccgcucggagcucucucaccccguguuggagugggagagaacagagcugguccugacgga

SEQ ID NO: 4204370 - RNA, 64 nt, Human herpesvirus 6B
ugguuuuauaagcucaagaggguuuuuuacaaugagccuggcuuaagaagggcuuuaaaaauua

SEQ ID NO: 4204371 - RNA, 64 nt, Human herpesvirus 6B; identical to SEQ ID NO: 4204290

SEQ ID NO: 4204372 - RNA, 61 nt, Human herpesvirus 6B
uuugcucggagucccggagaucuaaugggggagaugaacggagaucugggagacgagggag

SEQ ID NO: 4204373 - RNA, 99 nt, Human herpesvirus 7
acagucaccaagggcguagaggcagaccuaaacccagagcuaaaacauggagcgaagcuuuaucccaccgguccuuccucaacauuuacgcguggcugu

SEQ ID NO: 4204374 - RNA, 74 nt, Human herpesvirus 7
acugaacaacggaguaacaacacgcuauccaaagauuuauuuguaggcucugaagauggguuguuauccucggu

SEQ ID NO: 4204375 - RNA, 58 nt, Human herpesvirus 7
agaguuucgaauccuuuuaagcuugcuggcaacgucaucuugcggauauugaaaaucu

SEQ ID NO: 4204376 - RNA, 68 nt, Human herpesvirus 7
agauguacaucguuuuccugcgaaugugaauggccagacgaagcacaguaaguaaaaaugguuacacu

SEQ ID NO: 4204377 - RNA, 103 nt, Human herpesvirus 7
agauuuagagauauagaugucauaaauuuuaguugccgugaugcaauuuuuucgcauagcgugccagaguggauuuguugacuguccucuugucucucguucu

SEQ ID NO: 4204378 - RNA, 119 nt, Human herpesvirus 7
auaacgggauaggaaucauagagauauuuuggguaauaugucuuuagaauacuugcccccuguuagaagacguauuggucaauauaaucauuugagaaucuacaaaaaaauucuguugu

SEQ ID NO: 4204379 - RNA, 55 nt, Human herpesvirus 7
auuugaagaacaagaggcacuguuugaaaaaguaguuguuuuagguuuuuuaaau

SEQ ID NO: 4204380 - RNA, 80 nt, Human herpesvirus 7
caaaaauuuaauagucauuuucaaauagaguuuaauuguacucacuuaauuucugguauggaauuggcgagggauuuuug

SEQ ID NO: 4204381 - RNA, 129 nt, Human herpesvirus 7
cuggucugugcauaguuugaucaguuaaaucaaguauuucagucuguaguauucugugcauuuuuuuagaauuguuuauagacguggaauuucuuggcucguccaauaucauggaauccuuuuuuaccg

SEQ ID NO: 4204382 - RNA, 69 nt, Human herpesvirus 7
gacuagaaaagaagcuaugaugccugugaaugucaacagcaaacacaggaaaaauaguggugucuacuc

SEQ ID NO: 4204383 - RNA, 71 nt, Human herpesvirus 7
gagaaaaggucuguaccauauggaauugucauggaaggaaaauuaagacaguuuauggacaauuuuggcuc

SEQ ID NO: 4204384 - RNA, 66 nt, Human herpesvirus 7
gauagggaucguggugaaguuccaggcuccaguuaggcggccauggcaaugcuacgaguucuccuc

SEQ ID NO: 4204385 - RNA, 68 nt, Human herpesvirus 7
gauccuucuugagaugcccaaggauuuguuguugccacaaaagcaucgcuaucaacucgagaaugauc

SEQ ID NO: 4204386 - RNA, 77 nt, Human herpesvirus 7
gcuauguuugucauguaaguauugguuugcucauuagaaaauagaaucaucaaugcuucaucgaaucgucgcauagc

SEQ ID NO: 4204387 - RNA, 74 nt, Human herpesvirus 7
gggaauagaggugcacuuuuuauagcggaacccguauuauuugguugguacaucugaaguucacaucuguucuu

SEQ ID NO: 4204388 - RNA, 129 nt, Human herpesvirus 7
gugcauguuuucauuuauuaaguuuucgauuauaucuucuagaguuauugccgugcgugcuuuuucaagugggaccguauugguacauaucuuuaugagugaugcgaaaauuauauaaugcaguugcac

SEQ ID NO: 4204389 - RNA, 125 nt, Human herpesvirus 7
guuuuguuuauaaaguguggucugguuccacagcgugguuuucgguguuauuguucugcaucuaucggaguuuuuaguaugccaccgcuaacuacgguggcacagacaacaauauggacugagac

SEQ ID NO: 4204390 - RNA, 57 nt, Human herpesvirus 7
uagaucgcuuuaaaaucuuauuucccucuaugggacaaaaagauugugagcaauuua

SEQ ID NO: 4204391 - RNA, 86 nt, Human herpesvirus 7
ucagaaacauuuaccucacuuucuucaguacucauuccaggauuuguuucagcuggauacaugagacagucaggugagucuuuuga

SEQ ID NO: 4204392 - RNA, 112 nt, Human herpesvirus 7
ucgagcgacagucaccaagggcguagaggcagaccuaaacccagagcuaaaacauggagcgaagcuuuaucccaccgguccuuccucaacauuuacgcguggcugucuuuga

SEQ ID NO: 4204393 - RNA, 101 nt, Human herpesvirus 7
ucuguaaugaaccaaaucugauauuuuuaacacaauggcaauuagggugccgaaauaagaugccauugaaugcguuggaaauauuagcaugcaucuacaga

SEQ ID NO: 4204394 - RNA, 56 nt, Human herpesvirus 7
uguguccacuacagauauugaugacguuaucuaauauuauaucuaaaguggagaca

SEQ ID NO: 4204395 - RNA, 127 nt, Human herpesvirus 7
uugucacaguugugguuaauguuaauccagaaaaaauaaaucuauauguuguauuaaaauccauuugaaaaagauauuuuauauagauugucuccacuuuagauauaauauuagauaacgucaucaa

SEQ ID NO: 4204396 - RNA, 67 nt, Human herpesvirus 7
uuuugucaugugaaauuggcauuaaugcgauuucugaaaaggcguuuuccgguuucacauuaaaaaa

SEQ ID NO: 4204397 - RNA, 57 nt, Human herpesvirus 7
aacuuguucuguguaguauucuguguuuguuagcagggguaauaacagaacauuguu

SEQ ID NO: 4204398 - RNA, 58 nt, Human herpesvirus 7
aagggaauugauuugguuaaucauggugaaaaccguuuuaauuuucuguaauucuguu

SEQ ID NO: 4204399 - RNA, 76 nt, Human herpesvirus 7
aaguugggacaaugcuuagaaucuguagucgaugugauuuguuuuucuuuugauguacuaggucuuguucuagcuu

SEQ ID NO: 4204400 - RNA, 121 nt, Human herpesvirus 7
acugagaaucuuguuuauuguuagaacacacuuuacauguucuggauuuagaugcagaucuagaucucgauguaucagagcugcuucuagaucuguguuuuuggcgaugucuuguuuuagu

SEQ ID NO: 4204401 - RNA, 78 nt, Human herpesvirus 7
aguaaagaugccgcacauucaccuggcggugacccgaacaugucuggucaccgccauagauguccgacaaaacuuucu

SEQ ID NO: 4204402 - RNA, 72 nt, Human herpesvirus 7
augacaaauuucaggaaaaacgguguuguaauaauucauuuguuuaagacauuauuugcugaacucugucau

SEQ ID NO: 4204403 - RNA, 78 nt, Human herpesvirus 7
cagcgacagguguuguuuccgaucuaaagacacuuauuugauuauuuugauuggaaaucaaaauucugcuugucucug

SEQ ID NO: 4204404 - RNA, 64 nt, Human herpesvirus 7
cauuuucaaguguauugggauuuguguuaagaucaucagaaucuauuccacuugaaucuaagug

SEQ ID NO: 4204405 - RNA, 55 nt, Human herpesvirus 7
ccaucgaaauuuauguuuaagaaaugcuuuugaaucaacugcauaaauucggugg

SEQ ID NO: 4204406 - RNA, 78 nt, Human herpesvirus 7
cguggaaaugauaucagaacacaaucuuucgguguacaagauugaauaucgaucaccgguguuauuugucuuucuacg

SEQ ID NO: 4204407 - RNA, 112 nt, Human herpesvirus 7
cuggcacgcugugauuguauuuacgagaaaaggucuguaccauauggaauugucauggaaggaaaauuaagacaguuuauggacaauuuuggcucacugcaaagugugcuag

SEQ ID NO: 4204408 - RNA, 81 nt, Human herpesvirus 7
gaaaggauucaauacaggggcuaucagaaacuuucaacagaagaacugugauggaucugguguccuucuuuaauccguauc

SEQ ID NO: 4204409 - RNA, 59 nt, Human herpesvirus 7
gaaauacuguguucugaauuugaucuagauauagauaucaaauguuugcauuguguuuc

SEQ ID NO: 4204410 - RNA, 55 nt, Human herpesvirus 7
gaacagacacuguauuugaaagauuuccaaauuuagaugauacuuuugucaguuc

SEQ ID NO: 4204411 - RNA, 62 nt, Human herpesvirus 7
gagugcagaaaugcuccgcgcuguucagcuccagccaagacgccggggacauuccucaucuc

SEQ ID NO: 4204412 - RNA, 83 nt, Human herpesvirus 7
gaugcgacaaaggagaguuucggugaggaaaaggcuuuuuaaagagucucagcaccgcggauuuaccauucgccagucgcguc

SEQ ID NO: 4204413 - RNA, 65 nt, Human herpesvirus 7
aauacaauuucuucgauuuguauggucuuagacaaaucuugaucagcgaauugggaauaaguauu

SEQ ID NO: 4204414 - RNA, 92 nt, Human herpesvirus 7
aguuuucgauuauaucuucuagaguuauugccgugcgugcuuuuucaagugggaccguauugguacauaucuuuaugagugaugcgaaaauu

SEQ ID NO: 4204415 - RNA, 93 nt, Human herpesvirus 7
augauuaguaguacugccacuggagaaugucgaggucuuuguaaaauuuaaggauguagauucgacauucucuuuaguuguugcgauagucgu

SEQ ID NO: 4204416 - RNA, 82 nt, Human herpesvirus 7
caucucuggucaguuggagucguucuauguaugaaaaaaacauuaucgcguuuucaugcucaucgucuccaagccucagaug

SEQ ID NO: 4204417 - RNA, 87 nt, Human herpesvirus 7
caucuucagagccuacaaauaaaucuuuggauagcguguuguuacuccguuguucaguuuuuauaaaugguucuggauuaaaugaug

SEQ ID NO: 4204418 - RNA, 85 nt, Human herpesvirus 7
ccuaguaaagaugccgcacauucaccuggcggugacccgaacaugucuggucaccgccauagauguccgacaaaacuuucugugg

SEQ ID NO: 4204419 - RNA, 80 nt, Human herpesvirus 7
cuaaauggauugucuuuguauuauguugguguguugcccacuacacacugaaacauaguacaagggcuaacucuuaaugg

SEQ ID NO: 4204420 - RNA, 92 nt, Human herpesvirus 7
gagauccuuuauuucaaaauuuuagcuucacugaaaagaugcagccugugcggucuccauuuuuuuuaccaaaugcugaaauccaggauuuu

SEQ ID NO: 4204421 - RNA, 61 nt, Human herpesvirus 7
gaguauuaucaaaggaaggguugcauuuuaaacugucuugcaauaugucucugauggucuc

SEQ ID NO: 4204422 - RNA, 85 nt, Human herpesvirus 7
gaucaguuaaaucaaguauuucagucuguaguauucugugcauuuuuuuagaauuguuuauagacguggaauuucuuggcucguc

SEQ ID NO: 4204423 - RNA, 113 nt, Human herpesvirus 7
gauucuaagcauuuuuuucuuugcagauucagaagaugaaagauuucuaaaagccucaacuuccggacccagaguauuuaucauuuucgcaauaaaauaguguauaccaaauc

SEQ ID NO: 4204424 - RNA, 73 nt, Human herpesvirus 7
gcagccaccaguaacgauugagugccgcgcggagagcaaaauguucugugguugcagcagucauagguggugu

SEQ ID NO: 4204425 - RNA, 64 nt, Human herpesvirus 7
gguuucgaggggccuauuuauuaguauuuucucuaauauuucugaugaauagcuuuuuaaaucc

SEQ ID NO: 4204426 - RNA, 114 nt, Human herpesvirus 7
guguaacucugccagucucuaaacuucuagccugcaccugucaaaaauugauuaguauuuuaagauacauuuuuuacgaugacaaacagcaagacguacuggauaaaguuccac

SEQ ID NO: 4204427 - RNA, 71 nt, Human herpesvirus 7
guuuugacgguggaaaguucgacaggaaugaaauucgucuguggaaauaaauccgcuugcucuguuaaaac

SEQ ID NO: 4204428 - RNA, 64 nt, Human herpesvirus 7
uauagacauuucguuauuccaucugguaaugucauaaaacuuuuuggaaaaacagaauguggua

SEQ ID NO: 4204429 - RNA, 65 nt, Human herpesvirus 7
uccggaagagacugucauaaucugauugauacauucgcaaggaauaugaagaguucuuguuugga

SEQ ID NO: 4204430 - RNA, 59 nt, Human herpesvirus 7
ugcguuguaaaaacaauuuguaaaauccuaaggauuucagaugaucuucuugcagcgca

SEQ ID NO: 4204431 - RNA, 65 nt, Human herpesvirus 7
uugauaacaguugaaagccaaauauuugccaaaaucgguuucaauuugcguuucgcuguugccaa

SEQ ID NO: 4204432 - RNA, 93 nt, Human herpesvirus 7
uuuggaauuugggucuggaacguagagagcauuagcauuaaaauuauaaaaagugccuuuaaaaugaaguuuuuuaguuucgcccucaucgaa

SEQ ID NO: 4204433 - RNA, 60 nt, Human herpesvirus 7
gcuguacagauagaaaucguucaaaucauucuucuugaaucuauuuaaaaguucugcagc

SEQ ID NO: 4204434 - RNA, 58 nt, Human herpesvirus 7
gguggugguaagcguguaggggauuaugaguuagugagaucucuguguuuaccucacc

SEQ ID NO: 4204435 - RNA, 77 nt, Human herpesvirus 7
guaagcaauguagauauaguggacucgaaaacuguuugugagaugcacgcuguuucuaaaaauaucuauuugcuuau

SEQ ID NO: 4204436 - RNA, 67 nt, Human herpesvirus 7
gucugaaggcgcggcucuguugcguacguauccgacgggcugcaacuuuucuccgcguccgcagcac

SEQ ID NO: 4204437 - RNA, 124 nt, Human herpesvirus 7
uaggguuaggguuagggccgcagcccuagaguuaggguuaggguuagggccgcagcccuaggguuaggguuagggccgcagcccuaggguuaggguuaggguuaggguucgggccgcagcccua

SEQ ID NO: 4204438 - RNA, 67 nt, Human herpesvirus 7
ugauuuaagaggaauagcacgucgcggaucuugaagaguuuuugaugugacuauuucuugguuguua

SEQ ID NO: 4204439 - RNA, 59 nt, Human herpesvirus 7
ugucaucguaauaauggaaacugugcuaguggcaggcuuccuauguguguaugaugaua

SEQ ID NO: 4204440 - RNA, 90 nt, Human herpesvirus 7
uguuaccagcugugauuauugcauuugcuucauuuuuuggaagacuguuuagaaauggagggaauagacgauuaucaaacaaagcguuca

SEQ ID NO: 4204441 - RNA, 127 nt, Human herpesvirus 7
uuuucaguuggggcauuuauguacagagaguagacaccacuauuuuuccuguguuugcuguugacauucacaggcaucauagcuucuuuucuagucaguucaguaugugguacuguuccucugagaa

SEQ ID NO: 4204442 - RNA, 62 nt, Human herpesvirus 7
aauggcaacgguugagcaaauucuucaucaccuauagaaugaauuucuucaaaauugcuauu

SEQ ID NO: 4204443 - RNA, 91 nt, Human herpesvirus 7
agagauauagaugucauaaauuuuaguugccgugaugcaauuuuuucgcauagcgugccagaguggauuuguugacuguccucuugucucu

SEQ ID NO: 4204444 - RNA, 68 nt, Human herpesvirus 7
aggguuguaugaacaauaucguuuauuucaauauguugaagcagguuaaagauauugucagaaauccu

SEQ ID NO: 4204445 - RNA, 56 nt, Human herpesvirus 7
auggagcaaauguuuuacuacgaaauguaaaucuaauaguaagcaagugcauucau

SEQ ID NO: 4204446 - RNA, 105 nt, Human herpesvirus 7
cagcggugacuccaaacgguuugugcucuggcgucucgauagggaucguggugaaguuccaggcuccaguuaggcggccauggcaaugcuacgaguucuccucug

SEQ ID NO: 4204447 - RNA, 79 nt, Human herpesvirus 7
ccccuuauggucucuggaagcguggucugcgcagauuugacccuguguacgcuuuuuucgaguccaucguuucgggggg

SEQ ID NO: 4204448 - RNA, 75 nt, Human herpesvirus 7
cggauauauuuccagacauauuguaaaaaaauggcuaaacaugaaaucauugcaagaugcugaggauuuaauucg

SEQ ID NO: 4204449 - RNA, 85 nt, Human herpesvirus 7
cggcuauuuuaaaaguaggcugcauuguaaaauucgaugcaaguacuggaucguuagcuguaauuagucugcaauuagauggcug

SEQ ID NO: 4204450 - RNA, 84 nt, Human herpesvirus 7
cuggccaugaggaauguuucuauaauuguuauuauuuaugcacuuuguuaaauuccauuuauaguuacaaaacuuuauugccag

SEQ ID NO: 4204451 - RNA, 75 nt, Human herpesvirus 7
cuucuaucagguuguugucauuaaaagagauuccauaauaagaaucuauggaugcaccaaacacuccagaugaag

SEQ ID NO: 4204452 - RNA, 65 nt, Human herpesvirus 7
gcuguucgugcuucacaguguuggauguucuuuuuuaacauuuguggccaggcaauugaacgagu

SEQ ID NO: 4204453 - RNA, 88 nt, Human herpesvirus 7
ggacagauauaguaaacggugucaaauuuugcauauugaagcgugucaauccaaaucucagauauugcguauugucguaaauuuguuc

SEQ ID NO: 4204454 - RNA, 88 nt, Human herpesvirus 7
gucugguuccacagcgugguuuucgguguuauuguucugcaucuaucggaguuuuuaguaugccaccgcuaacuacgguggcacagac

SEQ ID NO: 4204455 - RNA, 87 nt, Human herpesvirus 7
guuguuuaaaaauaacccaucgaaauuuauguuuaagaaaugcuuuugaaucaacugcauaaauucgguggcgauuauuacgacagc

SEQ ID NO: 4204456 - RNA, 129 nt, Human herpesvirus 7
guuuagaguucaaaugucuuacaaaaaucuuuauuguuuuggaagugcagaaaguugguacaaaaauauggguuucgaccagguuaugcaauuuuuacccaaugaguacauuucggaugaaucuuuaac

SEQ ID NO: 4204457 - RNA, 106 nt, Human herpesvirus 7
guuucaauaaaaaguuugcuuuuugaaguguuuuuauuaauuuccacgcccauauccgggggguugaauauauacgcuuaaaauucaguauuuuuuaugaagagac

SEQ ID NO: 4204458 - RNA, 87 nt, Human herpesvirus 7
guuugaccuuuuugaaaaaaggauuauuuuguguguuuuuguuuggcuuauugaauggucuauuuuuuacucgaaaaucuuucaaac

SEQ ID NO: 4204459 - RNA, 56 nt, Human herpesvirus 7
uccacauaaaaagagagaugucuacgcauguagauuauaggauuuuuuuguaugga

SEQ ID NO: 4204460 - RNA, 68 nt, Human herpesvirus 7
ugacauugaaaaaaucugcuguuguacuguugugcuuacuaacggaauaguagaguuuuuggauuuca

SEQ ID NO: 4204461 - RNA, 57 nt, Human herpesvirus 7
uuuuuuauguuucuucguuuaggucuuuuagugggauauggacguaaacaggaaaga

SEQ ID NO: 4204462 - RNA, 95 nt, Human herpesvirus 8 [Kaposi`s sarcoma-associated h
auccuaucagccuugguucccagggggugucuccgucugcucacggcgcucgugcggcacgacaggcauccucugacagagguguuugagggggu

SEQ ID NO: 4204463 - RNA, 128 nt, Human herpesvirus 8 [Kaposi`s sarcoma-associated h
cacgaccgucaaggcuaggaacauguucaccgcaccaaaaauggcgucugacacgagcacguaaaagcuguugccaacggccaucauggugcucaaugaaaacagcagcauuuccaaggcgguuguug

SEQ ID NO: 4204464 - RNA, 77 nt, Human herpesvirus 8 [Kaposi`s sarcoma-associated h
cagcgucgaguacauucgcaccgaauagcucacgcgugugcgugaagccgcuaccgacggacguauuccugaagcug

SEQ ID NO: 4204465 - RNA, 63 nt, Human herpesvirus 8 [Kaposi`s sarcoma-associated h
cgguguuuuuuguacuacagcucucaggccaaugugggaaaaguaggacggaaaaccuagccg

SEQ ID NO: 4204466 - RNA, 71 nt, Human herpesvirus 8 [Kaposi`s sarcoma-associated h
cuguacagcucgauggccuugaagucuauguuuugaauaaaggauagauucagggcgauaaaaguguucag

SEQ ID NO: 4204467 - RNA, 62 nt, Human herpesvirus 8 [Kaposi`s sarcoma-associated h
gacgauguggcucgggugaaugacggaaucccacacgggcucgccgcgcccgagcugucguu

SEQ ID NO: 4204468 - RNA, 55 nt, Human herpesvirus 8 [Kaposi`s sarcoma-associated h
gcaguuagacaccguuaucucccagucaccuaggaugaacguugccucugucugc

SEQ ID NO: 4204469 - RNA, 67 nt, Human herpesvirus 8 [Kaposi`s sarcoma-associated h
gcgagcggcaucuuugacgagcgugacuauggauuauucaucucucagccccggagcgugcccucgc

SEQ ID NO: 4204470 - RNA, 71 nt, Human herpesvirus 8 [Kaposi`s sarcoma-associated h
gggcgacacgcugcccugaucauagacccaucucugauguuccauccguggcaguggcagcauguuccacc

SEQ ID NO: 4204471 - RNA, 61 nt, Human herpesvirus 8 [Kaposi`s sarcoma-associated h
guaguauagguguuguuuagccacgccuuuuaccccggcuuucaaccuaaccuagugcugc

SEQ ID NO: 4204472 - RNA, 90 nt, Human herpesvirus 8 [Kaposi`s sarcoma-associated h
uccaggaggacagcgccucagcgaggaccugcgcagaaagaugcccuccauaguuguccaggacucaucgggguucauugccugccugga

SEQ ID NO: 4204473 - RNA, 118 nt, Human herpesvirus 8 [Kaposi`s sarcoma-associated h
acaagccgguccagcucuagggaaagcaggugugccuuugucuuucguucucgauuucgcacgaguuggcugcgcaguccaagggcgacccuucuuguuucuuccauggugggcuugu

SEQ ID NO: 4204474 - RNA, 55 nt, Human herpesvirus 8 [Kaposi`s sarcoma-associated h
gacgguggacaugaucagggugcugugcaccucguuucugacgugcccuuucguc

SEQ ID NO: 4204475 - RNA, 103 nt, Human herpesvirus 8 [Kaposi`s sarcoma-associated h
gagcacuguuauaagaccaaucacgggaggcuugguggccauucgcaccaggacggagccguccaccauuccuccggugacuggagacggggaagucaugcuc

SEQ ID NO: 4204476 - RNA, 55 nt, Human herpesvirus 8 [Kaposi`s sarcoma-associated h
uccagggucaccgccucacucugggaugaaacaagauggggcgugguuacccgga

SEQ ID NO: 4204477 - RNA, 57 nt, Human herpesvirus 8 [Kaposi`s sarcoma-associated h
auccagccuuagccaucauugcgugaagcuuguggcgcuggaagaaggcugucggau

SEQ ID NO: 4204478 - RNA, 76 nt, Human herpesvirus 8 [Kaposi`s sarcoma-associated h
cccuugugcacacggcccguauggacauuucaaacccaucaucugugucucccgauggcgacgugcacuacucggg

SEQ ID NO: 4204479 - RNA, 105 nt, Human herpesvirus 8 [Kaposi`s sarcoma-associated h
gccucagcaacugcgucauguaccuggcguccagcuauuauaacagcgaaaccccccucgucgacagagccagccuggacgauguacuugaacagggcaugaggc

SEQ ID NO: 4204480 - RNA, 65 nt, Human herpesvirus 8 [Kaposi`s sarcoma-associated h
guaacagaucccggucguccacccccugacugauggauagggugccccuaaagaccgucuguugc

SEQ ID NO: 4204481 - RNA, 103 nt, Human herpesvirus 8 [Kaposi`s sarcoma-associated h
gugcccuguggaguuuucgccuaauuagcugaaucucgacccccauugcggccagcaugcucacgaggaauaggcagcagaggcaggaccuaacuaggagcau

SEQ ID NO: 4204482 - RNA, 57 nt, Human herpesvirus 8 [Kaposi`s sarcoma-associated h
uccaggucagagagcagggaugcgauuuuucguuuuuuacccacugucaggcuuggg

SEQ ID NO: 4204483 - RNA, 64 nt, Human herpesvirus 8 [Kaposi`s sarcoma-associated h
uguccaccggacgaguggcgcggcgaagacgucgccagcaccagcuucugucggugucaugaca

SEQ ID NO: 4204484 - RNA, 73 nt, Human herpesvirus 8 [Kaposi`s sarcoma-associated h
uuccguaauaucuguuuuauauagugaggguucacgcaugcgcgagucccgacuaaugaggacaauuacugaa

SEQ ID NO: 4204485 - RNA, 66 nt, Human herpesvirus 8 [Kaposi`s sarcoma-associated h
auuguaaaagauccgauccucacauagcgugggauccagaagucccgagggcggguuauuggcagu

SEQ ID NO: 4204486 - RNA, 68 nt, Human herpesvirus 8 [Kaposi`s sarcoma-associated h
ccaaucacgggaggcuugguggccauucgcaccaggacggagccguccaccauuccuccggugacugg

SEQ ID NO: 4204487 - RNA, 75 nt, Human herpesvirus 8 [Kaposi`s sarcoma-associated h
gagaucucaggccuuuguagaggccaucucgccggaacgccuagcgggucuccugcggaggccaauagacgucuc

SEQ ID NO: 4204488 - RNA, 62 nt, Human herpesvirus 8 [Kaposi`s sarcoma-associated h
gaggaauccggggaugugaugaaguugggcauauugucuaaaucccagcaugccagauuuuc

SEQ ID NO: 4204489 - RNA, 82 nt, Human herpesvirus 8 [Kaposi`s sarcoma-associated h
gaucaccacuuuaauauccucuggaucgcagcagugggaccaccacaucagcuuguccugugggggauacacuguggugguu

SEQ ID NO: 4204490 - RNA, 55 nt, Human herpesvirus 8 [Kaposi`s sarcoma-associated h
ggacaucgccguggaccccggacugcuaacccgccggauuccauccguggugccc

SEQ ID NO: 4204491 - RNA, 115 nt, Human herpesvirus 8 [Kaposi`s sarcoma-associated h
uccaggccugggccuacuguaggcgcgagguugucguguuugugaccuuacugcuggccacccugauaucgacggccucgaucggccugcugacuccgguccugauuggccugga

SEQ ID NO: 4204492 - RNA, 130 nt, Human herpesvirus 8 [Kaposi`s sarcoma-associated h
uguacgcccuucuguaccaccaccugcaacugagcaaccacaaugacucccaggucuagauuggccacccuggggacugucauccuguuggucugcuuuugcgcaggcgcggcgcacucgaggggugaca

SEQ ID NO: 4204493 - RNA, 70 nt, Human metapneumovirus
uguuuuuauuaagcuggguccaucggcacauguaagguucucuacaucgccuaccuccaguguaaaaaca

SEQ ID NO: 4204494 - RNA, 58 nt, Human metapneumovirus
gcaaggcauaugaagagucauuuucagcaccugcugauaagucaauuaugagcuuugc

SEQ ID NO: 4204495 - RNA, 102 nt, Human parainfluenza virus 1 strain Washington/1964
gugauugucucuuugauuauuuuggcacuuucguucauggaggauacugucaugauguuugucuucauacaagugucuuguuuuauaauuaggucaaugcau

SEQ ID NO: 4204496 - RNA, 64 nt, Human parainfluenza virus 1 strain Washington/1964
agagcuaaugggugucauuauugaggaguguagacuuauauccuccugauuuucccgaugcuuu

SEQ ID NO: 4204497 - RNA, 82 nt, Human parainfluenza virus 1 strain Washington/1964
gguuaucagguauuaauuguguaggaucucuaggacauauauaugccaauuuugauucuauacaguuugugacaucugcacc

SEQ ID NO: 4204498 - RNA, 85 nt, Human parainfluenza virus 1 strain Washington/1964
uguaguacacacaauugauaugaauuauuggucugaugaugaaauaauuagagcaacuaguauauguacagcuaugacuauugca

SEQ ID NO: 4204499 - RNA, 90 nt, Human parainfluenza virus 2
cugcgguugcaauuguucuugaugcaucuaucacaucggauacugccuuguugguggauugaauugaagaugcaagauuguuuaucgcag

SEQ ID NO: 4204500 - RNA, 101 nt, Human parainfluenza virus 2
gcaguugauucgagaucuauauggacaagggaugcuuucucugcuccuacuuuauguauuaugaaugcaacugcauccuuuguugauaagucuguaacugc

SEQ ID NO: 4204501 - RNA, 78 nt, Human parainfluenza virus 3
gcccaagcauauugaauuauagaugauugagguucuccaucucguucuugaucugaucuauguucgaauuguucuggc

SEQ ID NO: 4204502 - RNA, 62 nt, Human parainfluenza virus 3
gcuacucccagagcaaugguuccaauuaccccuccaaagaaucguuuuguucugggauuagu

SEQ ID NO: 4204503 - RNA, 69 nt, Human parechovirus 2
uguccaaauuucuucuuucccuuaccagcaccaaaaccagcaacacguaaauauagaggagauuuggca

SEQ ID NO: 4204504 - RNA, 68 nt, Human parechovirus 2
cccagggcuaauuagauuuguaguguagaugcacaucaucagauuacaaagugaauucagaacugugg

SEQ ID NO: 4204505 - RNA, 104 nt, Human parechovirus 2
ucuacugcuuucagacauauugauugguggauacaaacuuuguugaaaauuaaggauaugguacuaucaguauuuaagcccaguguggagaagagagcaguuga

SEQ ID NO: 4204506 - RNA, 101 nt, Human parechovirus 2
uuuggagcugaagugaccgguucacgcaaggacgaaccaccaucauugaaaccaaggauggagguugaauuccuuaagcgcaagccagguuacuuuccaga

SEQ ID NO: 4204507 - RNA, 79 nt, Human parechovirus 2
caaugcuuuagguuauuuacuguguaaaccauugcuaacugguaccagcucugguagaauagagauauuccuuagcuug

SEQ ID NO: 4204508 - RNA, 69 nt, Human respiratory syncytial virus
gucuguuuuauugauguuguugauugcugagugaguugaucacugaucaaaaaucaucaagugacagau

SEQ ID NO: 4204509 - RNA, 60 nt, Human respiratory syncytial virus
agucuaaccuuuucaaucagaaauggggugcaauucacugagcaugauaaagguuagauu

SEQ ID NO: 4204510 - RNA, 63 nt, Human respiratory syncytial virus
auuuuuguuggaugcagugcauuuaguuuuaccauagcaugacacuauagcuccaagagaagu

SEQ ID NO: 4204511 - RNA, 69 nt, Human respiratory syncytial virus
gcuaucuuucuucuuaggaucuuuggaugaugcgaacuugcccuuuauugauucuaggaauuugguagc

SEQ ID NO: 4204512 - RNA, 80 nt, Human respiratory syncytial virus
ggcugacuucacuugguaaugucaaacuguucauagugucacaaaauacucgauuggacuguacuuuacaagugucagcc

SEQ ID NO: 4204513 - RNA, 81 nt, Human respiratory syncytial virus
ucagccuuagcagauuaaauguuugcuuaauuacuuggauaaguaauuguuugaauacauuaaauaaaagcuuagggcuga

SEQ ID NO: 4204514 - RNA, 62 nt, Human respiratory syncytial virus
acccucaucuuauagauguuuuugugcacuuuggcauugcacaaucaucaacaagagggggu

SEQ ID NO: 4204515 - RNA, 63 nt, Human rhinovirus 89
cagaugcauuuguuccugauugccauguguaaucaucacguuuuucggggacaggugcuccug

SEQ ID NO: 4204516 - RNA, 73 nt, Human rhinovirus B
uacucuggccauucagcauaacacacaacagcguuggcugcuucuuguguuguuauuguugaauucccgagug

SEQ ID NO: 4204517 - RNA, 65 nt, Human T-lymphotropic virus 1
ggguuuuuuaggcuggacaacuaacacuuugguuuugucuuuggggguccaggccugacaagccc

SEQ ID NO: 4204518 - RNA, 123 nt, Human T-lymphotropic virus 2
agugagaucggggggcccuggggaaggagaggugagggugguaguaauggcauugguggcucuuaggucaugaaugaaccuccauuuaccauuugguuuuuuaacggggaagacgggguuauu

SEQ ID NO: 4204519 - RNA, 57 nt, Human T-lymphotropic virus 2
caagcucuugggucccgguacccgugaagggcagaauauagggauuguagguguuug

SEQ ID NO: 4204520 - RNA, 59 nt, Human T-lymphotropic virus 2
ccacggcaguuauguuguagagcuuguugaauggcauguaacgcauggaguuguugugg

SEQ ID NO: 4204521 - RNA, 78 nt, Human T-lymphotropic virus 2
cugguuaugucgguuuuguaaccgcuguggaagggccuggauuuggcggaggauacaggggccaaacaauaugacgag

SEQ ID NO: 4204522 - RNA, 91 nt, Human T-lymphotropic virus 2
ggaaacauuuuccucaugggguugaggacggcugcuaauuguuguucgaagaggguggggcuguuuuuaaaccccuguggaaggacagucc

SEQ ID NO: 4204523 - RNA, 80 nt, Human T-lymphotropic virus 2
gagaggcuggaucuauccacgcaaaccaugcaggaguaauuggugcucuguaaggucagcuggauaaauuugaguauuuu

SEQ ID NO: 4204524 - RNA, 56 nt, Influenza A virus
uccuggaagagaaggcaauggugaaauuucgccaacaauugcucccucuucgguga

SEQ ID NO: 4204525 - RNA, 92 nt, Influenza A virus
ggugccuuacugaaugacaggcauucaaaugggacuguuaaggacagaagcccuuauagggccuuaaugagcugcccugucggugaagcucc

SEQ ID NO: 4204526 - RNA, 120 nt, Influenza B virus
cuggugccgucucuguauugauaacauuacugguugauaaccugauguuuucauauccucugagaagauuagguaguugucugauuuuuguucugucgugcauuauaggaaagcauccag

SEQ ID NO: 4204527 - RNA, 82 nt, Japanese encephalitis virus
gaucuucugcucuaucucaacaucagcuacuaggcacagagcgccgaaguauguagcugguggugaggaagaacacaggauc

SEQ ID NO: 4204528 - RNA, 99 nt, Japanese encephalitis virus
aauggugaaaugguugacccuuuucagcugggccuucuggugauguuucuggccacccaggagguccuucgcaagagguggacggccagauugaccauu

SEQ ID NO: 4204529 - RNA, 64 nt, Japanese encephalitis virus
accaguccauugggcauguguauguugucuaacaugaucuuugccucuguccaaugggcuaggu

SEQ ID NO: 4204530 - RNA, 84 nt, Japanese encephalitis virus
agauccuguguucuuccucaccaccagcuacauacuucggcgcucugugccuaguagcugauguugagauagagcagaagaucu

SEQ ID NO: 4204531 - RNA, 69 nt, Japanese encephalitis virus
gaccuugaccacuuugugccuguaagucaguucaauuauggcucgagcgagcaugcgguguucaccguc

SEQ ID NO: 4204532 - RNA, 71 nt, Japanese encephalitis virus
guggugaagcucaugagcaaaccuugggacgccauugccaacgucaccaccauggccaugacugacaccac

SEQ ID NO: 4204533 - RNA, 57 nt, Marburg virus
cuccggacccugaaccggauguuaugagguccucaucaucauuguuugggucugugg

SEQ ID NO: 4204534 - RNA, 128 nt, Marburg virus
ggcugugggcaguggugaggguauuuuggacggagcacauguuugauucuucguggaguuguauucuugaagagcaccgaagcauccagugucauucguuuguguuccauuguuacuuguccaauauu

SEQ ID NO: 4204535 - RNA, 58 nt, Measles virus
acccuucaccugaagcuugagcauuccggauugugucugcagcaugcagggggagggu

SEQ ID NO: 4204536 - RNA, 77 nt, Measles virus
cgguuacucuggaggagcagaugcaagauaguaagaauccaggcaguuuugcagccaucaguuccucaagaauuccg

SEQ ID NO: 4204537 - RNA, 82 nt, Measles virus
gcuucggaaaguuguugccucuggauuggaguuucaggagcucguggaucuccccuccuucugcaguuucaacaucagaagc

SEQ ID NO: 4204538 - RNA, 59 nt, Measles virus
gccugguuuuugcacuuggugggauagggggcaccagucuucacauuagaagcacaggc

SEQ ID NO: 4204539 - RNA, 66 nt, Measles virus
ugaguauagaguuaagcaauccaucuugcccugaggcaacaucaugguggauuaauucuuugcaca

SEQ ID NO: 4204540 - RNA, 64 nt, Measles virus
uuguuucgacucgagaaagauacuggaucaucuaacacgguauuacaucuucacgucgaaacag

SEQ ID NO: 4204541 - RNA, 120 nt, Measles virus
cccaugccgacuugucgaaaucguagaucucugucauuguggaacuuaggaggcaaucacuuugcuccuaaguuuuuuauaauggauuuagguuguacuaauuaggucgacuggcauggg

SEQ ID NO: 4204542 - RNA, 70 nt, Measles virus
ccguaagcuggggccaaauaaugacaggauuucuguauaguaucugagcaauuugagcccuagcuucugg

SEQ ID NO: 4204543 - RNA, 90 nt, Measles virus
ggaucuuccuuguugacucuuugucuucuauguuaaauaaauccugauuacaauuuggauauggaauaugagagugggccggauaacucc

SEQ ID NO: 4204544 - RNA, 92 nt, Measles virus
aauugguuccaaaacuguucucaguagucuccuguauucugcgaucucuacccucgugcaguuauugaggagaguuauauugggcauuaauu

SEQ ID NO: 4204545 - RNA, 70 nt, Measles virus
ccagaagcuagggcucaaauugcucagauacuauacagaaauccugucauuauuuggccccagcuuacgg

SEQ ID NO: 4204546 - RNA, 94 nt, Measles virus
ccaguccguuuuugacauggcgugccugcucuucugccaucggcuccagucgugggaguggaugguugguuggcuggcggcuguguggaccugg

SEQ ID NO: 4204547 - RNA, 80 nt, Molluscum contagiosum virus
aaguuguacagcguggcaugcugcacgucguccagccgcugcuccacgaagcacagcaugcaguagccgcuguacugcuu

SEQ ID NO: 4204548 - RNA, 58 nt, Molluscum contagiosum virus
agcgcuacgugcuggaacaggugcacgcgcgugcgcgcccugcgccgcacguauggcu

SEQ ID NO: 4204549 - RNA, 58 nt, Molluscum contagiosum virus
aggaagcgcucuagguuggguguguacgcgucgcggcacacuaacagcgcgcuguccu

SEQ ID NO: 4204550 - RNA, 65 nt, Molluscum contagiosum virus
cagaacagcacguuguucuugcgcguggcgaugucgccgcagugcucgcacacgugcacguccug

SEQ ID NO: 4204551 - RNA, 78 nt, Molluscum contagiosum virus
cagccgccugccgcgcucgugccgccugcgcgcacccgagggcgugcgcuuugaggaacuagugcugcugggcgguug

SEQ ID NO: 4204552 - RNA, 64 nt, Molluscum contagiosum virus
cagcucgcgcagcgcaucggggggaaacuccaaggccagcuccucgguguacugcuugcaguug

SEQ ID NO: 4204553 - RNA, 72 nt, Molluscum contagiosum virus
ccgugagugucgcgaccguagaagaugcuggcauguaccuugucacugucgcgacaacaacaagcuacacgg

SEQ ID NO: 4204554 - RNA, 60 nt, Molluscum contagiosum virus
ccuucuucuugaagccgcgcagcuuguucagagagaagaucgcgaucuugaaggaguagg

SEQ ID NO: 4204555 - RNA, 79 nt, Molluscum contagiosum virus
cgagagaaagcugaugcccucguugccgcugagcgagaagacgcagguuuugaugagcucgccguugguguucucuacg

SEQ ID NO: 4204556 - RNA, 71 nt, Molluscum contagiosum virus
cgcauguagcucuggaugugcucggugaguagcgcacgcgcuuggcgcucgucuuccagagccugcgagcg

SEQ ID NO: 4204557 - RNA, 56 nt, Molluscum contagiosum virus
cgcgccgaggacuaccuggcggcgcuggagacggcaguguccugguucuuugcgcg

SEQ ID NO: 4204558 - RNA, 78 nt, Molluscum contagiosum virus
cgcgcgcagucccucgcgcgucuccgcguagaaugggucugacggguccaacgcggaggcgcgcgcggccagcgcgcg

SEQ ID NO: 4204559 - RNA, 89 nt, Molluscum contagiosum virus
cgcgcgcgcgcacgcgcuuggagcgcgggcgcagaggcaggggcguucccuugcgcuugugcguacgcgcgggcgcggacgcgggcgcg

SEQ ID NO: 4204560 - RNA, 57 nt, Molluscum contagiosum virus
cgcgggcgcagacgccgagcgggcaaugggcacgcucuacggcgugcugugccugcg

SEQ ID NO: 4204561 - RNA, 55 nt, Molluscum contagiosum virus
cgcuuggcgggcagcggcgacgacgacuucggcgcaacgcuggccgccauccgcg

SEQ ID NO: 4204562 - RNA, 91 nt, Molluscum contagiosum virus
cgucgcggcguaucaucuccacaauggcggcgcgcgacuucgcggcgcucgcggcgcucgcggcgccgcuguccugugagugcgcucggcg

SEQ ID NO: 4204563 - RNA, 62 nt, Molluscum contagiosum virus
cgugcgccgcgcccagucgaccagcgcguuguagcgugucguguccgcgggcucggcgcgcg

SEQ ID NO: 4204564 - RNA, 64 nt, Molluscum contagiosum virus
cgugcucacggcagcguaauccuugccagagaaggauucuuuuuucacguugcuaauggcggcg

SEQ ID NO: 4204565 - RNA, 82 nt, Molluscum contagiosum virus
cugcgagucgcccguguucgcggagcugugccgcagcaacccgcggcucucgcggcccuucguguucgcggacggcgcgcag

SEQ ID NO: 4204566 - RNA, 79 nt, Molluscum contagiosum virus
cuggccucgcccagauccgcccagcuugcaacugcaaugucugugugcgaucuggagaacuugccuuuugcggggucag

SEQ ID NO: 4204567 - RNA, 59 nt, Molluscum contagiosum virus
cugggagcaccgcguggcgcgcgacgugugcucugugcgcgcagacguggugcucgugg

SEQ ID NO: 4204568 - RNA, 122 nt, Molluscum contagiosum virus
cugucgaugauguggcggcccucuucguccugcaugacgauguagcucuugagguaggguaccuugagcaggagcacguuccugccggugaugaaguagaugaggaaagccagguugaucag

SEQ ID NO: 4204569 - RNA, 68 nt, Molluscum contagiosum virus
cuuuugcgggggcgcgcgaaugcgcucgccgccuagaagccggcgcguucccgcagcgccugcggaag

SEQ ID NO: 4204570 - RNA, 55 nt, Molluscum contagiosum virus
gacagucuagugcguccgcccuuacgacaagcguaagccaccgcgcaggaccguc

SEQ ID NO: 4204571 - RNA, 57 nt, Molluscum contagiosum virus
gauggagguccagggcacggucggagaagucucgcacgaccuucuggggcucgaguc

SEQ ID NO: 4204572 - RNA, 59 nt, Molluscum contagiosum virus
gcacagcucgcgcugcgucugcgagaugagcgugucaaagcagucguacgugagcaugc

SEQ ID NO: 4204573 - RNA, 66 nt, Molluscum contagiosum virus
gcacauguacggcguacacaacuuccgcgugggcauguucaaccucacguacacgccgcacauugc

SEQ ID NO: 4204574 - RNA, 87 nt, Molluscum contagiosum virus
gcacguccgcgggcgcguaggccagcaccugagccagcaggucaaagugcucgccggccagcagcgugcgcgccagcgcgggcaugu

SEQ ID NO: 4204575 - RNA, 55 nt, Molluscum contagiosum virus
gccauggccagcuucugcgccgcgcagcccggaagcgcgccgugccuggccuggc

SEQ ID NO: 4204576 - RNA, 56 nt, Molluscum contagiosum virus
gccccugcacguucacgcgcuccaggagccccacgggcgcggagaacugcaccagc

SEQ ID NO: 4204577 - RNA, 57 nt, Molluscum contagiosum virus
gcccuuugccacggcgagucacgucucugaaggcuuggcuucucgacuggagggggc

SEQ ID NO: 4204578 - RNA, 60 nt, Molluscum contagiosum virus
gccgccaggcggcgcgugcucuccaccagcgcguugaccagguacacggccucuggcggc

SEQ ID NO: 4204579 - RNA, 125 nt, Molluscum contagiosum virus
gccuggcgcgcgcgcgcgccgcgcguagugcucuuuguggaccgcggcgucaucgacaucaagcgcgcucugcgccagcgccgccaggacagcauugccgcggcgugcgcgcguaagcgcgaggc

SEQ ID NO: 4204580 - RNA, 81 nt, Molluscum contagiosum virus
gcgagaacuacgccaggugcacgaccgcgcgcugcugcgccuggacgcagagcccgugcaugugagccauggcuaccuugc

SEQ ID NO: 4204581 - RNA, 78 nt, Molluscum contagiosum virus
gcgagcaccucacggagcgcgagaagaaguacauccugcagauuaucacgcacggacgcucgugaggaaagcguucgc

SEQ ID NO: 4204582 - RNA, 55 nt, Molluscum contagiosum virus
gcgaggcgcuggucucguucgacgcucgccgcugcgucaacaggcuggucuucgc

SEQ ID NO: 4204583 - RNA, 58 nt, Molluscum contagiosum virus
gcgccggcuggcaauguagcguaccagcgacugcagguugcgcacgccgugcuggcgc

SEQ ID NO: 4204584 - RNA, 78 nt, Molluscum contagiosum virus
gcgcgcagcgcccgcguacacgugcacgcgcacggguguggcccccgaguacgugagcacaguguagcgcgcgcgcgc

SEQ ID NO: 4204585 - RNA, 64 nt, Molluscum contagiosum virus
gcgcgcgccgagcccgcggacacgacacgcuacaacgcgcuggucgacugggcgcggcgcacgu

SEQ ID NO: 4204586 - RNA, 63 nt, Molluscum contagiosum virus
gcggcucuccgcacacgugcucguugccgcaguggcgcgcaagacgaguagugcgcgagccgc

SEQ ID NO: 4204587 - RNA, 56 nt, Molluscum contagiosum virus
gcgugcuggccagcgcgcguccgcgcucgcgcucgaugcgcgccuuggcuagcagc

SEQ ID NO: 4204588 - RNA, 78 nt, Molluscum contagiosum virus
gcucgcugaagcugugcgcgcaggccacgggguuggcgugcucgcugacgccggcgcgcgugggcagcaucucgacgc

SEQ ID NO: 4204589 - RNA, 83 nt, Molluscum contagiosum virus
gcucguagcccaugugcucgcgugccuugcgcgugcguaugacgaagcaggcauuggcaacggcgagcguguaaggguugagc

SEQ ID NO: 4204590 - RNA, 63 nt, Molluscum contagiosum virus
gcucuggguccgguuccgaauaccagucggcgcugagcgccuucggagggucggagccugagc

SEQ ID NO: 4204591 - RNA, 97 nt, Molluscum contagiosum virus
ggagagacgcucagaacguggucaagauccaagcgcaacacggccuucuccucgcucugcucuugaugcugaacgaucucugacccgcgccuacucc

SEQ ID NO: 4204592 - RNA, 92 nt, Molluscum contagiosum virus
ggcagcgcuuguuucgcaugcacagccgcuuucugggcgcgugcgagcggcgcgcgcugagcgcggagcuggcguugccgagcgagcacgcc

SEQ ID NO: 4204593 - RNA, 72 nt, Molluscum contagiosum virus
ggcaggaagggcgcugaacuuagcgcgcagccggcgcgaaccggcacgccucaagcucgggcccagaccgcc

SEQ ID NO: 4204594 - RNA, 72 nt, Molluscum contagiosum virus
ggcgcagcaggaugcuggugucgagcucgcgcgccagcacgcgcucguccgccgcgucguagcaaaugcgcu

SEQ ID NO: 4204595 - RNA, 64 nt, Molluscum contagiosum virus
ggcgcugggcgcgccgcgcgcgccgggaaugcugcgcacgcuagucguuggcgcgcccggcgcc

SEQ ID NO: 4204596 - RNA, 86 nt, Molluscum contagiosum virus
gggaaguguugccgccggccuuguucgcgcuucugccccguccucgcucgugcucuuggcguucgcagugcccgggggcgcuuccc

SEQ ID NO: 4204597 - RNA, 85 nt, Molluscum contagiosum virus
gggcgcgagcgugaacgcgcgcgugcgguguugcucgaagggcuccacgagcaauucgcuuugcagcccgcacucacgcacgccc

SEQ ID NO: 4204598 - RNA, 56 nt, Molluscum contagiosum virus
gggcgcugaacuuagcgcgcagccggcgcgaaccggcacgccucaagcucgggccc

SEQ ID NO: 4204599 - RNA, 91 nt, Molluscum contagiosum virus
gguaacgucggcgggcucggaaggugucgcgucugcguguuuugcgcugacggugcucccgacgccuucugagcccgagcugacagugacc

SEQ ID NO: 4204600 - RNA, 91 nt, Molluscum contagiosum virus
ggucacugucagcucgggcucagaaggcgucgggagcaccgucagcgcaaaacacgcagacgcgacaccuuccgagcccgccgacguuacc

SEQ ID NO: 4204601 - RNA, 80 nt, Molluscum contagiosum virus
ggucucuguucuccgcggcgcgucgagcuugggcgugugccacgcucgcuccuuauucucggcuugccgcacacacgacc

SEQ ID NO: 4204602 - RNA, 75 nt, Molluscum contagiosum virus
guacggugcgagccugcgcgcgcgcgccggcgccuggcuggcucgcaacuacccgcaggccuacgccgccgcuac

SEQ ID NO: 4204603 - RNA, 66 nt, Molluscum contagiosum virus
gucgcccaucacgucgaagaucaagcuggacaucgagaccagcuuuaucuucguggagacggcgac

SEQ ID NO: 4204604 - RNA, 69 nt, Molluscum contagiosum virus
gugccgcgugcgcgggcaguuccgcgcguucgaacacguguucgaacugcucgcguugguuugcagcac

SEQ ID NO: 4204605 - RNA, 121 nt, Molluscum contagiosum virus
gugugcgcucacacggaacgagaacaagugugugugugugugugcucacacggaacgagaacaaguuugugugugcgcucacacggaacgagaacaagugugugugugugugugcucacac

SEQ ID NO: 4204606 - RNA, 58 nt, Molluscum contagiosum virus
gugugugugcgugcucacacggaacgagaacaaguuugugugugcgcucacacggaac

SEQ ID NO: 4204607 - RNA, 66 nt, Molluscum contagiosum virus
ucacgcgcagcucaaugagcgugcgcucacauugcagcagugcgcguacaauguagcugccgauga

SEQ ID NO: 4204608 - RNA, 63 nt, Molluscum contagiosum virus
ucaugggcucgggcaagaccaucaucgcgcugcucuucgcgcugaucguguccaaguucaaga

SEQ ID NO: 4204609 - RNA, 74 nt, Molluscum contagiosum virus
ucgagcacguccaugggcucguccuguacuggcguucccacgcccacagucaugugcccaugugcuacugccga

SEQ ID NO: 4204610 - RNA, 76 nt, Molluscum contagiosum virus
ucgcgggacgggcucccuaagcgagcgaguugcgucuuucgcacgcagcucugcgcuaucgagcacgucgugguga

SEQ ID NO: 4204611 - RNA, 100 nt, Molluscum contagiosum virus
ucguccggauucaugucugucggcaacgucggugcacguugcucgaccgcuuuccgcagcuguucgcgcagagauguugucaagccgucggauccgacga

SEQ ID NO: 4204612 - RNA, 83 nt, Molluscum contagiosum virus
ucuaccgccggaggcacgcuggcacuugcgggugccucgaauccugucacugcugccgcggggcuagcgcugcagggcguagg

SEQ ID NO: 4204613 - RNA, 64 nt, Molluscum contagiosum virus
ugaccuugggcuccucgcgcagcgccacgugcgugcguacagugcucgcaaaggagucgcggca

SEQ ID NO: 4204614 - RNA, 68 nt, Molluscum contagiosum virus
acaccccuagaggugcacgcagagcuggucgcccugcgcagggcggccgcgagcagcugugggggugu

SEQ ID NO: 4204615 - RNA, 81 nt, Molluscum contagiosum virus
acgugcgaagucauggccccuugucuaguuggagauauauuuucauuuugaacucuugcgagcggcaaccagcaaguacgu

SEQ ID NO: 4204616 - RNA, 61 nt, Molluscum contagiosum virus
acugcgcagccgccgaguauggcguguuuauaccccgcgugugcucgcucgugcugccggu

SEQ ID NO: 4204617 - RNA, 55 nt, Molluscum contagiosum virus
agcccgcaguauugcgcgagccccagcauccugcguccgcacgcgcgcucgggcu

SEQ ID NO: 4204618 - RNA, 55 nt, Molluscum contagiosum virus
aucagcgcgaucucgaucgaacacgcagacgggcgucucgauaaucgcgacuggu

SEQ ID NO: 4204619 - RNA, 71 nt, Molluscum contagiosum virus
augcgcacgaucagguagagcgcgcagccggccacuugcggcaggaauugcagcgccugcgacgagcgcau

SEQ ID NO: 4204620 - RNA, 100 nt, Molluscum contagiosum virus
auggagcgucuucuuguugugcuuugaugacuaugcgucuuccugcugccgggagaggaaaggcgcacccucacaccuagagcacgaagcuacgcuccgu

SEQ ID NO: 4204621 - RNA, 72 nt, Molluscum contagiosum virus
cacaucaugggcucgggcaagaccaucaucgcgcugcucuucgcgcugaucguguccaaguucaagaaggug

SEQ ID NO: 4204622 - RNA, 124 nt, Molluscum contagiosum virus
cagcagguugaagaugcccagcuccuugaggcucaugagcuccacggucaugcggaacaugcgccgcgugcuguggaagucgucauaggccugguacucggaaauggggaucuuguacuugcug

SEQ ID NO: 4204623 - RNA, 126 nt, Molluscum contagiosum virus
ccgcguagacuugcaucgagcugcgguugagcgcgagcccggaugcgugcacgucgagcacggccagcaagaggucgugcgccgcggcgcgcgccaacucgcgcaccacgccagccguccacgugg

SEQ ID NO: 4204624 - RNA, 112 nt, Molluscum contagiosum virus
ccuaggagcucgggggcugguagugcuuggguucccguguaaccaguucggucaccaggaaaacgcccagaaugccgagaucuugccuucccugaagcacguccguccuggg

SEQ ID NO: 4204625 - RNA, 55 nt, Molluscum contagiosum virus
ccugcggggugccuuuccugcgggguaccuuuccugcggguaccuuuccugcggg

SEQ ID NO: 4204626 - RNA, 63 nt, Molluscum contagiosum virus
ccuucgugcacgccuucgacgccaucuucuacccgcccgcgggcgacguggcgcgcgccgagg

SEQ ID NO: 4204627 - RNA, 125 nt, Molluscum contagiosum virus
cgacacaggugcgugugcuuguugcuaggcguguccgcagcugugcgcgugcuugccgccgcacagcugcgggcugcggcuacgugccacaguuccuuccguuuuuuguauacgcaucgaagucg

SEQ ID NO: 4204628 - RNA, 89 nt, Molluscum contagiosum virus
cgccgcggcgcgcagguuuucgggccuuaaaugaacaccaaggaguccgugcugcuggagaucaucccgaagauccgcgcguaccugcg

SEQ ID NO: 4204629 - RNA, 78 nt, Molluscum contagiosum virus
cgcgugauggcgauggaaacagaaacccugguccugucgaacucgcgggugcagggcccuguuuuguacgcucacgug

SEQ ID NO: 4204630 - RNA, 66 nt, Molluscum contagiosum virus
cgcgugggcggcagagagccggcgcucgcaccagaggcgcgcgccgcgccuguguccgucuccgcg

SEQ ID NO: 4204631 - RNA, 74 nt, Molluscum contagiosum virus
cgcucggugaugcgcgacauggacaucgccagugcguagucgcgcgcgggcagcaugucgcgcagcaccaggcg

SEQ ID NO: 4204632 - RNA, 58 nt, Molluscum contagiosum virus
cggcgccucgagcgcgcuggacuugcgcgagcgagugaaggucgcguuccaggugcug

SEQ ID NO: 4204633 - RNA, 78 nt, Molluscum contagiosum virus
cggcgcggugcgucgcugcgcguggugggcacgcgcaagacgcccgacagcccgcacgugcacgcgcgcacgccgccg

SEQ ID NO: 4204634 - RNA, 84 nt, Molluscum contagiosum virus
cgucguucgacaaggacguccuguagcaaggggucugccguucggcgaggaugccuuucaggggucugucguuuuacaaugacg

SEQ ID NO: 4204635 - RNA, 75 nt, Molluscum contagiosum virus
cuaccuugucaaagaccgggcgguaguuggugucgaugaugaugguggcaugguugcgguuguugaugcgguugg

SEQ ID NO: 4204636 - RNA, 70 nt, Molluscum contagiosum virus
cucugugcggcgccguggcgcgcgacgacguugugcuccuuguccgagcgaaccgcggcagccuugcgag

SEQ ID NO: 4204637 - RNA, 90 nt, Molluscum contagiosum virus
cugccgcugccugugcccaguuauucucugcgcgcaagucaccgcuccgcagccggagcuugcgcgcggugcgggcgcgagcgacggcag

SEQ ID NO: 4204638 - RNA, 55 nt, Molluscum contagiosum virus
cugcgcguacgccgcaugguugagaaugugcuuggucauguggaugucgcaguag

SEQ ID NO: 4204639 - RNA, 67 nt, Molluscum contagiosum virus
gaaacgcucggccucggagcgcggcacgcgcucgaacgcgcccgcguccagcuccagguuuagcuuc

SEQ ID NO: 4204640 - RNA, 130 nt, Molluscum contagiosum virus
gacgcccuccucgaccugcacgacccucuucgacuuacggacgcccuccucgaccugcacgacccucuucucgagugcacguaaagacggcgauucgugcucguguugugccugcgucuagccgcgcguc

SEQ ID NO: 4204641 - RNA, 84 nt, Molluscum contagiosum virus
gacggccuccgaguccuccgcggccaauucgcgcucgcagaugcgcagcggcgacucuggcacguggucgggcauggggcaguu

SEQ ID NO: 4204642 - RNA, 86 nt, Molluscum contagiosum virus
gacguggagaugcucauggacgcgcucgggcuuccgcgcacucuagcggucucgcgaguugcguucgugcgcgcacucaccgcguu

SEQ ID NO: 4204643 - RNA, 84 nt, Molluscum contagiosum virus
gagcucgcuccgcggcagcagcgcgugccgcagaagguuguagccguugaccuuguacugcacgugcuccgcgucgaugagcuc

SEQ ID NO: 4204644 - RNA, 85 nt, Molluscum contagiosum virus
gaggcgcccccgcggaagccgcgcccgcgagcuugacaacuccgaucucaucgcacgcuggugucgcuuccaugggcuccgcguc

SEQ ID NO: 4204645 - RNA, 66 nt, Molluscum contagiosum virus
gcacacgacggcggguucucgucccgugugcgcggguacacgacggcggguucucgucccgugugc

SEQ ID NO: 4204646 - RNA, 67 nt, Molluscum contagiosum virus
gcagaacagcacguuguucuugcgcguggcgaugucgccgcagugcucgcacacgugcacguccugc

SEQ ID NO: 4204647 - RNA, 73 nt, Molluscum contagiosum virus
gcagcaguagaaaaugcccagccgaauguucaggaugagcuugcggaucauggugugcacguucgcgcgcugc

SEQ ID NO: 4204648 - RNA, 65 nt, Molluscum contagiosum virus
gcaggcagcgcaagcgcaggcaguacgcggccacguacgcgcgcagcagugccagcgcuguccgc

SEQ ID NO: 4204649 - RNA, 67 nt, Molluscum contagiosum virus
gcaugucagccacggcuguuccguggcguuguaguacgcuucguccaccagcgugugguugaucagc

SEQ ID NO: 4204650 - RNA, 60 nt, Molluscum contagiosum virus
gccaggcgccgcgcccgcgcgcaccaccgacaccagcgcgggccggaagcccacgauggc

SEQ ID NO: 4204651 - RNA, 70 nt, Molluscum contagiosum virus
gccauuuaaaaagcggaaaaaugcacgcccgggcauggcucugcgucuggcuuuucguuuuuugcguggc

SEQ ID NO: 4204652 - RNA, 127 nt, Molluscum contagiosum virus
gcccucguuggccugccggaucagcuuggucuucuugccgcggcagcgcaccguggccuuguccugcgugaggugccgcagccgcagguaguagauggggcccaugaagacggcggccgcguagggc

SEQ ID NO: 4204653 - RNA, 63 nt, Molluscum contagiosum virus
gcccugugcccgaguagaagagcguggacacgaagacgaagcgcucgcucgcgcgcagcucgc

SEQ ID NO: 4204654 - RNA, 116 nt, Molluscum contagiosum virus
gccgccggggcgcgccgacgccgccggggcgcgccgacgucaccgggcgcgccaacgccgccgggcgcgccgacgucaccgggcgcgccaacgcugccgggcgcgccaaagguugu

SEQ ID NO: 4204655 - RNA, 76 nt, Molluscum contagiosum virus
gccgcgacaucuuccgcuuccuggugggccaggacauuuacuaccccggcauccuggaagcgggcgagaucguggc

SEQ ID NO: 4204656 - RNA, 76 nt, Molluscum contagiosum virus
gcgagcagaggcaugcuuuuuguucugcgcagggacgcgcuuuucgcacgagcgaaaacgcgugucuuccgcucgu

SEQ ID NO: 4204657 - RNA, 95 nt, Molluscum contagiosum virus
gcgcaggguccagacaaugcgugcgcccgucgccguagcagcuguagcagcggcgcagcuggcgcgcgucaaagagcuccuggaagaccuugugc

SEQ ID NO: 4204658 - RNA, 79 nt, Molluscum contagiosum virus
gcgccugccguucugcgcgcuagcgcagcugcgcugccuggagcagcgcgugagcuacgagcgccagcaaccggcgcgc

SEQ ID NO: 4204659 - RNA, 84 nt, Molluscum contagiosum virus
gcgcgaugaagaagaaguacacguaguugaggucgcugcucgaaagcacguuauuuuccugcagcgccuccagcgcgugcgcgc

SEQ ID NO: 4204660 - RNA, 75 nt, Molluscum contagiosum virus
gcgcuggcgugcgcagugcugcgcgacgucgucaaggauguagccuacguggcgggcaaggcgcgacaccuuugc

SEQ ID NO: 4204661 - RNA, 118 nt, Molluscum contagiosum virus
gcgcuuccuguuagcaaaccggcggcggcuacgcggcgacaucuucaugguuacggagcguagcuucgugcucuaggugugagggugcgccuuuccucucccggcagcaggaagacgc

SEQ ID NO: 4204662 - RNA, 77 nt, Molluscum contagiosum virus
gcggcagcgccacguccucgcacacgcggaucuccuugggcaugaugccuguggacuccuugugcagguagcgccgc

SEQ ID NO: 4204663 - RNA, 91 nt, Molluscum contagiosum virus
gcggcagcucgcugaagcugugcgcgcaggccacgggguuggcgugcucgcugacgccggcgcgcgugggcagcaucucgacgcuguccgc

SEQ ID NO: 4204664 - RNA, 83 nt, Molluscum contagiosum virus
gcggcgagacgaaguccagcacgcgcgcgugcgggaagcgcaugaccagcgucaggcacgcgcgcgugucuuccagccgcugc

SEQ ID NO: 4204665 - RNA, 65 nt, Molluscum contagiosum virus
gcgugcgcaccugcgcaagauguacggcgcaagcaggucuaucuacaacuucgcugugcguaugc

SEQ ID NO: 4204666 - RNA, 56 nt, Molluscum contagiosum virus
gcuccgcguggcagugcgcgggggaggcuccagagcgcgcagcgggcgcgcggggc

SEQ ID NO: 4204667 - RNA, 80 nt, Molluscum contagiosum virus
gcugcguggcauccgcgucccggcucugcucguccacgauaaucgucacgcgcacgucggcgcgcgcuagcuccagcagc

SEQ ID NO: 4204668 - RNA, 96 nt, Molluscum contagiosum virus
gcuucaggcgcagcagcucgcgcagcgcaucggggggaaacuccaaggccagcuccucgguguacugcuugcaguugagcgcgcgcgccaacaggc

SEQ ID NO: 4204669 - RNA, 61 nt, Molluscum contagiosum virus
ggaagaccgucgugcuguuguccacgcggugugucacgcgcaccagugugaccaggucucc

SEQ ID NO: 4204670 - RNA, 62 nt, Molluscum contagiosum virus
ggacaacgugcgccgcgcgccgcgcgugcgcacgcacuugcuggccgcccuggcgcuguucc

SEQ ID NO: 4204671 - RNA, 92 nt, Molluscum contagiosum virus
ggacucugacuucuggcgagaagcuuuccaugccgcucccuaguugcguguaggggccugcaguugagagccuucccgugccgcucauagcc

SEQ ID NO: 4204672 - RNA, 62 nt, Molluscum contagiosum virus
ggagcgagcucuucguguacuucggcagcucucugcacaggcacgagcuggagcuggccuuc

SEQ ID NO: 4204673 - RNA, 57 nt, Molluscum contagiosum virus
ggcgcacgcgagcacgccugcacgcgcacuugccuggcguccuucuuugcgugcgcc

SEQ ID NO: 4204674 - RNA, 77 nt, Molluscum contagiosum virus
ggcgccgcucuccucgggcaaggaggcgagcucggcacuagcucagcacgcgccgcagcucgggguccagcggagcc

SEQ ID NO: 4204675 - RNA, 63 nt, Molluscum contagiosum virus
ggcgcuggucacaugcacguacucgucguccaccacgaggagcuugguguuauugacggcguc

SEQ ID NO: 4204676 - RNA, 64 nt, Molluscum contagiosum virus
ggcggaugcggacacguagaccuugccauacaacgcacagcgccacuucugcgugacauccgcc

SEQ ID NO: 4204677 - RNA, 61 nt, Molluscum contagiosum virus
ggcucgaaaucugcgcgaggccauggccgagagccugggccgcacuucgcgcagcuuggcc

SEQ ID NO: 4204678 - RNA, 56 nt, Molluscum contagiosum virus
gggaccggcaccugcuacucccguacgcacggaaggagaaaagggguuguaguccc

SEQ ID NO: 4204679 - RNA, 85 nt, Molluscum contagiosum virus
gggcgacguugucgcgccacuugagacucgcauguccggcgauccaggacaucucgacguccacaguucuggccggcacacgccc

SEQ ID NO: 4204680 - RNA, 58 nt, Molluscum contagiosum virus
gggcguccgagggcgcgugccuuucccuggcguccgagggcgcgcgccuuucccgucc

SEQ ID NO: 4204681 - RNA, 61 nt, Molluscum contagiosum virus
gggcucgggguuggcuuugugcacgucugugugaaggaaugcuaguccuagccgcgagccc

SEQ ID NO: 4204682 - RNA, 100 nt, Molluscum contagiosum virus
gggggcgcggcaggaggauuggaggacgugcacgggccagcgcuaacgcgaggccccggcccgugcugucugugcauguagcagucguucuugcccuccu

SEQ ID NO: 4204683 - RNA, 71 nt, Molluscum contagiosum virus
ggguugguacccugcgagccauuaugcucggaguagccguugcucagcaugauguacuugaugaugagccc

SEQ ID NO: 4204684 - RNA, 55 nt, Molluscum contagiosum virus
uguccacguaccugucgagugcgcaaacacagcuucgagaggucaugaugguaca

SEQ ID NO: 4204685 - RNA, 74 nt, Molluscum contagiosum virus
ugugggucucgagccgcacaaagaacgcgcgucgaaggagcccgucuacauuuugcggcgcaucucgauucaca

SEQ ID NO: 4204686 - RNA, 59 nt, Molluscum contagiosum virus
uguugccgucgucgcugcaguuugcucgcgugagcaaggucaggccuugacggacaaca

SEQ ID NO: 4204687 - RNA, 63 nt, Molluscum contagiosum virus
uguacuccgacggcuucgaggccgagcccuccucgcugggcuccgugagcucguccgagccca

SEQ ID NO: 4204688 - RNA, 62 nt, Molluscum contagiosum virus
uucucgcagcuggaccugcgcgccgacgaccugagucggcgcggcgugcacgcuggcgagaa

SEQ ID NO: 4204689 - RNA, 94 nt, Molluscum contagiosum virus
uugcacgccccgcgccgcgcagaaaagccucgcaguugggcagucucaccucgcugccguccagguucagcgcggccugggggccgccgugcaa

SEQ ID NO: 4204690 - RNA, 59 nt, Molluscum contagiosum virus
aagaucacgcuggaccuggcgcagcuggagcacugcaccaucucguccuccaagaccuu

SEQ ID NO: 4204691 - RNA, 81 nt, Molluscum contagiosum virus
accagcgccaugcggaagggcgcgcgcagcaggcucgcgcgcgcaaagcgugccuccugcacgcgguccaucgcgcgcggu

SEQ ID NO: 4204692 - RNA, 65 nt, Molluscum contagiosum virus
acgccugagcacgugcgccgcuucgaggccaugacgggcgccgacacgcgcgugcucauccgcgu

SEQ ID NO: 4204693 - RNA, 75 nt, Molluscum contagiosum virus
acgcgucggacacguccagaaccuuggcacugcccuccaggcaacaguugaggugcucgaugagaguucgcgcgu

SEQ ID NO: 4204694 - RNA, 67 nt, Molluscum contagiosum virus
acguugugcgcaacgucuuccgcgcgcuuguagccgcgacgcaagcgcgaaacgguaagcucgacgu

SEQ ID NO: 4204695 - RNA, 64 nt, Molluscum contagiosum virus
agccgcgcugucgcugccuguaccccgagcccagcguggaggccaucgggcgcgaccugcggcu

SEQ ID NO: 4204696 - RNA, 56 nt, Molluscum contagiosum virus
agcgaauauggaccuugcacgcuuucguagacggggucgugagggacagagucgcu

SEQ ID NO: 4204697 - RNA, 61 nt, Molluscum contagiosum virus
agcgguagucggcgaugagcccggccagcgagcggugcuucauggcaacgacaaagcugcu

SEQ ID NO: 4204698 - RNA, 82 nt, Molluscum contagiosum virus
agugauugccaucgauuaugcuugaguuacaucgucaaauggacuuaccgaaaugcuagcgagcaaagucguggcaccgacu

SEQ ID NO: 4204699 - RNA, 84 nt, Molluscum contagiosum virus
cacgugcggagcacuucuccgaugggucggucgugacuccacgugcggagcacuucuccgaugggucggucgugacuccacgug

SEQ ID NO: 4204700 - RNA, 77 nt, Molluscum contagiosum virus
caucggagaagaaugcgaggcgcgacuggcacacggagcacguggugcacgaguccgcgggcggcuccuccacggug

SEQ ID NO: 4204701 - RNA, 58 nt, Molluscum contagiosum virus
caucuucuugaugaucuugcgcgccagcgugccggugcgcgaggucucgcagacgaug

SEQ ID NO: 4204702 - RNA, 59 nt, Molluscum contagiosum virus
cauugaggagguguuugcacccccccgggaaaaggagggaagcgugucacuuuccgaug

SEQ ID NO: 4204703 - RNA, 56 nt, Molluscum contagiosum virus
ccaagcgggcgcgccacucccugucuuucggcagcgaaacgcgugccucgcgccgg

SEQ ID NO: 4204704 - RNA, 69 nt, Molluscum contagiosum virus
ccaggaacgugaaguacuucucgauguugggaaugugguucuugaccuugaucgagaugugguucuugg

SEQ ID NO: 4204705 - RNA, 78 nt, Molluscum contagiosum virus
ccccggaggagaaaugucuugaucgugaagaggcaaggugcuguaacgcccacugacaaggucuuucucgcgucgggg

SEQ ID NO: 4204706 - RNA, 108 nt, Molluscum contagiosum virus
ccgugccguguccgcgacgcgcgcgcacgccgcgcgagcgcugggccgcacugcuaacggugcuggcgcgcgugcccugguccgcagucuugcuggcacuggcaaugg

SEQ ID NO: 4204707 - RNA, 55 nt, Molluscum contagiosum virus
cgagcgagcgaacucgacaacgcugacgggagucaggcgcgagggcgccuccucg

SEQ ID NO: 4204708 - RNA, 78 nt, Molluscum contagiosum virus
cgcagcuauacgccaucgagcccgagucuuccagcucggagacguacagcgacucggacucgagcgacucuggcugcg

SEQ ID NO: 4204709 - RNA, 83 nt, Molluscum contagiosum virus
cgcgagaaguucugcacagcacaggccccagcaacaagaguugucuuccaagcucuggcuugcgcuuagaccuuuacgucgcg

SEQ ID NO: 4204710 - RNA, 93 nt, Molluscum contagiosum virus
cgcgccgcgcguagugcucuuuguggaccgcggcgucaucgacaucaagcgcgcucugcgccagcgccgccaggacagcauugccgcggcgug

SEQ ID NO: 4204711 - RNA, 84 nt, Molluscum contagiosum virus
cgcgcuauucucguggcguugcugcugcgcgcgcuacugcgcgcacugcucgcgcacgcgcacgcgcacacgcugaguuacgug

SEQ ID NO: 4204712 - RNA, 130 nt, Molluscum contagiosum virus
cgcggacgcgggccuguccgcgggcgcacgcuuguccgcggacgcgggccuguccgcgggcgcacgcuuguccgcggacgcgggccuguccgcgggcgcacgcuuguccgcggacgcgggccuguccgcg

SEQ ID NO: 4204713 - RNA, 55 nt, Molluscum contagiosum virus
cgcggauggcggccagcguugcgccgaagucgucgucgccgcugcccgccaagcg

SEQ ID NO: 4204714 - RNA, 82 nt, Molluscum contagiosum virus
cgcuacacguuccgcgugcugcgcgccaguuuuccgugccccgagcugcguggcgcgggaagcgcgagcggcgcggacggcg

SEQ ID NO: 4204715 - RNA, 59 nt, Molluscum contagiosum virus
cgcugcgcgcggcgcuggcagguggcgcgaacuaaccaguucuagcagcugcgccagcg

SEQ ID NO: 4204716 - RNA, 55 nt, Molluscum contagiosum virus
cgcuuccuggacacgcgcaucguguacugccacauguccaagcugcaggaacgcg

SEQ ID NO: 4204717 - RNA, 60 nt, Molluscum contagiosum virus
cggagacucgcgcaacagcgcugcgcaggaucaugcaggcgcugggcggcgaguacuuug

SEQ ID NO: 4204718 - RNA, 99 nt, Molluscum contagiosum virus
cggagagacagcgcaaaggcggcucuccgcacacgugcucguugccgcaguggcgcgcaagacgaguagugcgcgagccgcgcgggcgcggauuuuccg

SEQ ID NO: 4204719 - RNA, 66 nt, Molluscum contagiosum virus
cgggcucggaaggugucgcgucugcguguuuugcgcugacggugcucccgacgccuucugagcccg

SEQ ID NO: 4204720 - RNA, 76 nt, Molluscum contagiosum virus
cguaaaggucuaagcgcaagccagagcuuggaagacaacucuuguugcuggggccugugcugugcagaacuucucg

SEQ ID NO: 4204721 - RNA, 62 nt, Molluscum contagiosum virus
cgucugcuuuugcgucgcgcguuaccagcgcauugacaccgacgcgcgcgcaaacgcggacg

SEQ ID NO: 4204722 - RNA, 61 nt, Molluscum contagiosum virus
cucgcgcaucugccgcgacuccuuugcgagcacuguacgcacgcacguggcgcugcgcgag

SEQ ID NO: 4204723 - RNA, 56 nt, Molluscum contagiosum virus
cucugugucggaauccucgcggacgcaccacgcgaaaagggucuggucgcacggag

SEQ ID NO: 4204724 - RNA, 70 nt, Molluscum contagiosum virus
cuucuccgacugcuucguuuucgaccuggugaguaucccgcgcagcacgcugagcguggcaguggggcag

SEQ ID NO: 4204725 - RNA, 67 nt, Molluscum contagiosum virus
cuucuggcgggcagcucugcuggcaggcauccuuggcucggcuugccggcguccucuucccgcggag

SEQ ID NO: 4204726 - RNA, 63 nt, Molluscum contagiosum virus
gaacgacacggagcggaucgugcuggagaucgacaagaucaaggucacgccgcccgaguauuc

SEQ ID NO: 4204727 - RNA, 59 nt, Molluscum contagiosum virus
gagauguuccccgagcucgaccuggaguucagcauccaguccaaguucaacaacgucuu

SEQ ID NO: 4204728 - RNA, 65 nt, Molluscum contagiosum virus
gagcgcgccgcuggaggcgagcguugcccauucugccgcgugacgucuucucgcgggacgggcuc

SEQ ID NO: 4204729 - RNA, 63 nt, Molluscum contagiosum virus
gaggacgugcgcgagaacuacuucuucggcgucucggacaucgacuucaucgaguacgucuuc

SEQ ID NO: 4204730 - RNA, 73 nt, Molluscum contagiosum virus
gcaacgagcucgcggcgcagcaugagcggcgagacuagugccuucgucgucaggcugggcgcgcgagcuaggc

SEQ ID NO: 4204731 - RNA, 57 nt, Molluscum contagiosum virus
gcacugccaugcccacauuggcgcccgcguucgggugcgugaucugcauggcuaggc

SEQ ID NO: 4204732 - RNA, 78 nt, Molluscum contagiosum virus
gcagcguguacucggccacgcgguggugcgugggcacuagagugccugccgcggccgcggcgcgaacgugcgcguugu

SEQ ID NO: 4204733 - RNA, 78 nt, Molluscum contagiosum virus
gccccgcgccgcgcagaaaagccucgcaguugggcagucucaccucgcugccguccagguucagcgcggccugggggc

SEQ ID NO: 4204734 - RNA, 77 nt, Molluscum contagiosum virus
gccugcugcacgcacugcguuacucgggcugcuaugccucgggcauggccaccgggaugcgcauggcgcgcacaugc

SEQ ID NO: 4204735 - RNA, 74 nt, Molluscum contagiosum virus
gccuguccgcgggcgcgggccuguccgcgggcgcacgcuuguccgcggacgcgggccuguccgcggaugcaggc

SEQ ID NO: 4204736 - RNA, 85 nt, Molluscum contagiosum virus
gccuuuccuuguugcggggggccuuuccuucggggugccuuuccucguucccggggugugccuuuuccuuguuacaggggugugc

SEQ ID NO: 4204737 - RNA, 66 nt, Molluscum contagiosum virus
gcgcacacgggcucgagcucggcguccggcacgcgguagcaaccguugggcucgauuucguugcgc

SEQ ID NO: 4204738 - RNA, 56 nt, Molluscum contagiosum virus
gcgccacgagcuugucccgccaggggcguccagcucgcuggacaaguugguggggc

SEQ ID NO: 4204739 - RNA, 56 nt, Molluscum contagiosum virus
gcgccgagcccgcggacacgacacgcuacaacgcgcuggucgacugggcgcggcgc

SEQ ID NO: 4204740 - RNA, 109 nt, Molluscum contagiosum virus
gcgcgcgcccagcgugugcggguagagcauguuggccagguagguguucucgaagcugagcucggggaaggccacuggcgagcguacgcccggcgcgccgggcgcgcgu

SEQ ID NO: 4204741 - RNA, 59 nt, Molluscum contagiosum virus
gcgcggcgggggagagcucgcgcacgaagauuaccacguucgggccugccagccggcgc

SEQ ID NO: 4204742 - RNA, 84 nt, Molluscum contagiosum virus
aaccguuguuuugucgcgugugcggggcagcaggcacuaggcgccggggcgcgcgcgcuuguuuggugucgcgcacgcacgguu

SEQ ID NO: 4204743 - RNA, 81 nt, Molluscum contagiosum virus
acggcuccuccaccagcgccuucuugaccagcaccagcaccguccagcugguguagaggaagcgcaggugcuugagcaugu

SEQ ID NO: 4204744 - RNA, 64 nt, Molluscum contagiosum virus
agacccaguggcguuugccgugacaagacacuguccuuccuccggcgaaaagccgcucgcgucu

SEQ ID NO: 4204745 - RNA, 83 nt, Molluscum contagiosum virus
agacucgugcugcagcagcagcgcuuucagguuuuugauucccauuaaaugaaagacgugcugcugcugcugggcaagccucu

SEQ ID NO: 4204746 - RNA, 63 nt, Molluscum contagiosum virus
agcacguccaugggcucguccuguacuggcguucccacgcccacagucaugugcccaugugcu

SEQ ID NO: 4204747 - RNA, 83 nt, Molluscum contagiosum virus
agcgcgcgccgguugcuggcgcucguagcucacgcgcugcuccaggcagcgcagcugcgcuagcgcgcagaacggcaggcgcu

SEQ ID NO: 4204748 - RNA, 130 nt, Molluscum contagiosum virus
agcugggcaucacgcuggucaaggaccacaugaacgaggugcgcgugaacaucggcagcgggcgccuagugcgcccguuccugguagugcaccagggcguucuggucauggacaccgucggugccgagcu

SEQ ID NO: 4204749 - RNA, 83 nt, Molluscum contagiosum virus
aguguccgugagugucgcgaccguagaagaugcuggcauguaccuugucacugucgcgacaacaacaagcuacacggucaacu

SEQ ID NO: 4204750 - RNA, 55 nt, Molluscum contagiosum virus
ccaggccugggcuucggaagcggccucugaggaguauccacgccaccaggccugg

SEQ ID NO: 4204751 - RNA, 55 nt, Molluscum contagiosum virus
ccaggccugguggcguggauacuccucagaggccgcuuccgaagcccaggccugg

SEQ ID NO: 4204752 - RNA, 95 nt, Molluscum contagiosum virus
ccucgugguggacgacgaguacgugcaugugaccagcgccgacauggacggcacgcacuacgcgcggcacgccuucgucagcuuuaacugcgcgg

SEQ ID NO: 4204753 - RNA, 77 nt, Molluscum contagiosum virus
cgaguaugggcagcagcgagagcaugguauccacguccacguccacguccaccgcgucugcgcgcgugcccgucucg

SEQ ID NO: 4204754 - RNA, 67 nt, Molluscum contagiosum virus
cgcaucagguagcgcucguccacgaagcgcgugaccagcgugacgucggacaggccuugcagacgcg

SEQ ID NO: 4204755 - RNA, 83 nt, Molluscum contagiosum virus
cgccagcagcagaggaguagcgugcgccugcagccuguuuuuaucgagccgcgcuucgagcacgcuuuccuuugcggcgagcg

SEQ ID NO: 4204756 - RNA, 74 nt, Molluscum contagiosum virus
cgccuggugcugcgcgacaugcugcccgcgcgcgacuacgcacuggcgauguccaugucgcgcaucaccgagcg

SEQ ID NO: 4204757 - RNA, 62 nt, Molluscum contagiosum virus
cgcggugcacgcguagcacggccagcaugaugucggccaucuggucgugcucgugcaccucg

SEQ ID NO: 4204758 - RNA, 57 nt, Molluscum contagiosum virus
cgcucacggccuucgcguuccggcggcuggaccugcgccagcgccuguccgugggcg

SEQ ID NO: 4204759 - RNA, 67 nt, Molluscum contagiosum virus
cggcgcgcugcuccgcucguucagcacguggaaguacuugucguaguuguagucgggcagcuugucg

SEQ ID NO: 4204760 - RNA, 66 nt, Molluscum contagiosum virus
cgggcucagaaggcgucgggagcaccgucagcgcaaaacacgcagacgcgacaccuuccgagcccg

SEQ ID NO: 4204761 - RNA, 77 nt, Molluscum contagiosum virus
cgugcgucacuuugggcuacagacaggcacgcgcgcgcgcaccgugcgugcgccgcagugcaccaucaccacgcgcg

SEQ ID NO: 4204762 - RNA, 95 nt, Molluscum contagiosum virus
cguuccacgauggaacggcgacuuguagugcccggaauuauguguaguuaaaugacggagccgcggcaguccgagcuguucaacaucguggcgcg

SEQ ID NO: 4204763 - RNA, 57 nt, Molluscum contagiosum virus
cucgcugcgcucgcgcgagggcaucuacggaaccugcuucuucgacgagcgcgcggg

SEQ ID NO: 4204764 - RNA, 77 nt, Molluscum contagiosum virus
gaaccacaugcaggcggagcagcugcugggacgcauuugccgcgaaaccgagcagccgcgccgcacugucuacguuu

SEQ ID NO: 4204765 - RNA, 63 nt, Molluscum contagiosum virus
gacgugcucgauagcgcagagcugcgugcgaaagacgcaacucgcucgcuuagggagcccguc

SEQ ID NO: 4204766 - RNA, 77 nt, Molluscum contagiosum virus
gacuucuccgcgcugcacuacaaccauggcgcgcucuuuugcaagcgcgaaaacacguuggaggacguggacaaguc

SEQ ID NO: 4204767 - RNA, 94 nt, Molluscum contagiosum virus
gagcagugccgccgcgcaaaagcacagcaggagcacgccuggcggcagcacgggcggaagcuccugcugguucagguagcgcgccgcaaagcuc

SEQ ID NO: 4204768 - RNA, 90 nt, Molluscum contagiosum virus
gcagacguagcucugcucgcucugcgagaagccgggguacgcgaugaacuuguucucgacggggccguaguagggcuuuacguacacggc

SEQ ID NO: 4204769 - RNA, 63 nt, Molluscum contagiosum virus
gcaggagcagcggcucguagcuggugaucauuuacuacccgcaaaagggcugcgcgucccggc

SEQ ID NO: 4204770 - RNA, 64 nt, Molluscum contagiosum virus
gcagucgcucuuccacaacaagcgccugcuggacgaggcggagcuuguguccaagcugggcugc

SEQ ID NO: 4204771 - RNA, 116 nt, Molluscum contagiosum virus
gcaugggcaccaugaccacguaggggcccagcacgcgcagcguguccauggucacgccaaaguccacgcacaugacgcgcgugcgcaugucggcgcguaggugcaugcggcccagc

SEQ ID NO: 4204772 - RNA, 99 nt, Molluscum contagiosum virus
gccccuccgcggccgcgagcggcagccauacgugcggcgcagggcgcgcacgcgcgugcaccuguuccagcacguagcgcucgcggaaguugcagaagc

SEQ ID NO: 4204773 - RNA, 62 nt, Molluscum contagiosum virus
gccgucugcgccggcagcgucucgcgcgaagacuuccugcuggucgucgccggcgccaaggu

SEQ ID NO: 4204774 - RNA, 78 nt, Molluscum contagiosum virus
gcgagaaguucugcacagcacaggccccagcaacaagaguugucuuccaagcucuggcuugcgcuuagaccuuuacgu

SEQ ID NO: 4204775 - RNA, 57 nt, Molluscum contagiosum virus
gcgaggaagcguuccgauucgcgacgucucccuccgcgcgcggacgcguuucuucgc

SEQ ID NO: 4204776 - RNA, 65 nt, Molluscum contagiosum virus
gcgccagcggcgccagcagcugcuggauacugcgguugcucauccaggcgccgcgcucggggcgc

SEQ ID NO: 4204777 - RNA, 69 nt, Molluscum contagiosum virus
gcgcccgcguacacgugcacgcgcacggguguggcccccgaguacgugagcacaguguagcgcgcgcgc

SEQ ID NO: 4204778 - RNA, 74 nt, Molluscum contagiosum virus
gcgcgagcccggaugcgugcacgucgagcacggccagcaagaggucgugcgccgcggcgcgcgccaacucgcgc

SEQ ID NO: 4204779 - RNA, 55 nt, Molluscum contagiosum virus
gcgcgaggcucgcuaugguuccagaagacuugucucucgagcacgggcuuugcgu

SEQ ID NO: 4204780 - RNA, 105 nt, Molluscum contagiosum virus
gcgcgcccagcgugugcggguagagcauguuggccagguagguguucucgaagcugagcucggggaaggccacuggcgagcguacgcccggcgcgccgggcgcgc

SEQ ID NO: 4204781 - RNA, 76 nt, Molluscum contagiosum virus
gcgcgcgcgcgcuacacugugcucacguacucgggggccacacccgugcgcgugcacguguacgcgggcgcugcgc

SEQ ID NO: 4204782 - RNA, 64 nt, Molluscum contagiosum virus
gcgcggugcacgcguagcacggccagcaugaugucggccaucuggucgugcucgugcaccucgu

SEQ ID NO: 4204783 - RNA, 69 nt, Molluscum contagiosum virus
gcgcugguugcgccuggaaaccacgcuauccgugcccgaguuugugauggagggucuaggcuucagugc

SEQ ID NO: 4204784 - RNA, 74 nt, Molluscum contagiosum virus
gcggcgcuaccugcacaaggaguccacaggcaucaugcccaaggagauccgcgugugcgaggacguggcgcugc

SEQ ID NO: 4204785 - RNA, 89 nt, Molluscum contagiosum virus
gcgugugcucuucuccccggacggugcggucuucgagcucgacgacuucccgcugcacgaggucuucgccgcgggagaacugcucacgc

SEQ ID NO: 4204786 - RNA, 56 nt, Molluscum contagiosum virus
gcucgaucagguucgcggagugagagacugcuugcacgcugcguacguggucuugc

SEQ ID NO: 4204787 - RNA, 71 nt, Molluscum contagiosum virus
gcucgcggugcagcugccgcagagccgcgaaagcgucgugcuccacgcgcagcuucucugcgaucgcgggc

SEQ ID NO: 4204788 - RNA, 56 nt, Molluscum contagiosum virus
gcugcgugcccgcgaugcgcgccuugaugggcucguagauggcaggcacgucgggc

SEQ ID NO: 4204789 - RNA, 109 nt, Molluscum contagiosum virus
gcuucguccgcuacgcugugcacgcacgcgguugcgccuccgcguacgaaacacagguacgacaaguagcgcgcggccauguguacgcagugccggauggcggggaagc

SEQ ID NO: 4204790 - RNA, 63 nt, Molluscum contagiosum virus
ggcaaaagggcucugccaccaugcgcacagcacuucuuugcgcauuggcagcgcuuuguugcc

SEQ ID NO: 4204791 - RNA, 55 nt, Molluscum contagiosum virus
ggccuucgcugccuucgaagagaaugacuucucccgaaaagggugguagggggcu

SEQ ID NO: 4204792 - RNA, 99 nt, Molluscum contagiosum virus
ggcgcgccgacgccgccggggcgcgccgacgucaccgggcgcgccaacgccgccgggcgcgccgacgucaccgggcgcgccaacgcugccgggcgcgcc

SEQ ID NO: 4204793 - RNA, 64 nt, Molluscum contagiosum virus
ggcggaugucacgcagaaguggcgcugugcguuguauggcaaggucuacguguccgcauccgcc

SEQ ID NO: 4204794 - RNA, 74 nt, Molluscum contagiosum virus
ggcggcggcagucggcgggcacggccagcgucuucagcacgaagaugaccucguucccgucgaccgcgcgcgcc

SEQ ID NO: 4204795 - RNA, 89 nt, Molluscum contagiosum virus
ggcuggcgugcgcgucauuaaacuccaggaugcugucgaaauucucguagacggcauacgccugcagcagcaaugugcacacggcggcc

SEQ ID NO: 4204796 - RNA, 69 nt, Molluscum contagiosum virus
ggcugguguuuucguccauccacugcugcacguccacguaauugcagagaaacauguagaaggccagcu

SEQ ID NO: 4204797 - RNA, 69 nt, Molluscum contagiosum virus
gggacgcgucucaacgugggagucacagcccuggucgcaggcgaggacccccaucuugacacacguccc

SEQ ID NO: 4204798 - RNA, 88 nt, Molluscum contagiosum virus
gggcaucccgccgcugcgcuugcucacgcugcgcucggcgcgcgccgcgcgcgucgucgccguguuggaagucguggccguagugcuc

SEQ ID NO: 4204799 - RNA, 81 nt, Molluscum contagiosum virus
gggccaacguuccgucgugugcuugcggcucaguccaguuucgcguuugcaggccagugcgacguugcgugcuuguggccc

SEQ ID NO: 4204800 - RNA, 63 nt, Molluscum contagiosum virus
ggggacguccugcgccaugcgcagucucgugccgcgcugaguauggacgugggcggcagcccc

SEQ ID NO: 4204801 - RNA, 58 nt, Molluscum contagiosum virus
ggggucgcgcgagucgggcgggaaguagggcagcacucggcccagcacgcgcggcucc

SEQ ID NO: 4204802 - RNA, 56 nt, Molluscum contagiosum virus
ggugcacgcguagcacggccagcaugaugucggccaucuggucgugcucgugcacc

SEQ ID NO: 4204803 - RNA, 60 nt, Molluscum contagiosum virus
guacgcgcgagcgagcgccggggcucugcgcagcgugcuggcguucguucgcgccagugc

SEQ ID NO: 4204804 - RNA, 78 nt, Molluscum contagiosum virus
guaguggcggcaaaagggcucugccaccaugcgcacagcacuucuuugcgcauuggcagcgcuuuguugccucaguac

SEQ ID NO: 4204805 - RNA, 118 nt, Molluscum contagiosum virus
guccacgguuggcgccaucgacgaccucaagucucuguucgagaaccugcacgcgacgcugcgacgcagccgcgagcgcuugcgaccugaagacgaugacgaugacgacgacgaggac

SEQ ID NO: 4204806 - RNA, 117 nt, Molluscum contagiosum virus
guccagcaucccgcgcaugagcaccgagucggaccgcaucucggccaccagguacgacaugucuggccacguggagaccggcggcucggaaugcucgugcucgucgaugaccugcgc

SEQ ID NO: 4204807 - RNA, 105 nt, Molluscum contagiosum virus
gucgcgcagguugugcucgaugacgcggcgguugcgcgggcagagcaguggcagugcgaacucaggcgccagcucgucgcgcaugugcagcaccagcuuggugau

SEQ ID NO: 4204808 - RNA, 57 nt, Molluscum contagiosum virus
gugccgucagcacccaccaagaacuucucgaaguuccaggccacgucguugcggcac

SEQ ID NO: 4204809 - RNA, 77 nt, Molluscum contagiosum virus
guggagaugcucauggacgcgcucgggcuuccgcgcacucuagcggucucgcgaguugcguucgugcgcgcacucac

SEQ ID NO: 4204810 - RNA, 79 nt, Molluscum contagiosum virus
guugcgcucgaggguggccacgucgagucuguccaggaaauccaccagguccguguacccgcgcucguggcacugcaac

SEQ ID NO: 4204811 - RNA, 58 nt, Molluscum contagiosum virus
ucggaggccgacuaucuucuuuacggaacgcccugguucuggaagaaucggacucgga

SEQ ID NO: 4204812 - RNA, 84 nt, Molluscum contagiosum virus
ucuugcgugccuucgccaaugacggcgucucucgaacaccgacaaggagggagagcugcccgaguuucggaagagcaagcgaga

SEQ ID NO: 4204813 - RNA, 80 nt, Molluscum contagiosum virus
ugaagcuguucauccggaggauccgcauccucuaggcgcagccuccgguuuucgcgggagcggccuccggagaagcuuua

SEQ ID NO: 4204814 - RNA, 90 nt, Molluscum contagiosum virus
ugcgucuuuacacagcaacgagcucgcggcgcagcaugagcggcgagacuagugccuucgucgucaggcugggcgcgcgagcuaggcgcg

SEQ ID NO: 4204815 - RNA, 69 nt, Molluscum contagiosum virus
ugcugcagcagcagcgcuuucagguuuuugauucccauuaaaugaaagacgugcugcugcugcugggca

SEQ ID NO: 4204816 - RNA, 76 nt, Molluscum contagiosum virus
uggcacuggcgcgcacgcgcacgcucucgcuggcuccgcuggaccccgagcugcggcgcgugcugagcuagugccg

SEQ ID NO: 4204817 - RNA, 61 nt, Molluscum contagiosum virus
ugucaagcacggaaaggaagugcucgagagccucccgcauuucccugccggugcguuggca

SEQ ID NO: 4204818 - RNA, 66 nt, Molluscum contagiosum virus
uugcgagcgguguugcugacgacugcggcgagaagaagcugucggucucgagcgccgccaucacga

SEQ ID NO: 4204819 - RNA, 129 nt, Molluscum contagiosum virus
uuugccacggcgagucacgucucugaaggcuuggcuucucgacuggagggggcaacgccguucgugccguguccguuguuccagcuagaagaggccgucccggcgacuucagagggaagcucgcaagaa

SEQ ID NO: 4204820 - RNA, 74 nt, Molluscum contagiosum virus
uuuuccaugcgcaacgugcugcguagccuggccuuccgcgacuacgcgcugcgcggcgcggcgcgcguggagga

SEQ ID NO: 4204821 - RNA, 60 nt, Molluscum contagiosum virus
gcgcgggcgggcggugccucgcaauguguccgcgucgcuagcagugccgccuccucacgc

SEQ ID NO: 4204822 - RNA, 86 nt, Molluscum contagiosum virus
gcgcguccucggccagagccuucucgguguagaugugguacuuguugugcacgcuguccaggcgcugcacgaacucacggaugcgc

SEQ ID NO: 4204823 - RNA, 77 nt, Molluscum contagiosum virus
gcgcgugagccaauggacgccggggggcgccaaguccgagcaagcgggccaguacuacucggcgcuaugccgcgugc

SEQ ID NO: 4204824 - RNA, 80 nt, Molluscum contagiosum virus
gcggcuggaagacacgcgcgcgugccugacgcuggucaugcgcuucccgcacgcgcgcgugcuggacuucgucucgccgc

SEQ ID NO: 4204825 - RNA, 113 nt, Molluscum contagiosum virus
gcgucacgugcagcuugcuacgcaccgagacaucagcgcgaucucgaucgaacacgcagacgggcgucucgauaaucgcgacugguacuuccccguguacaaacucgugacgc

SEQ ID NO: 4204826 - RNA, 83 nt, Molluscum contagiosum virus
gcgugaacgcgcgcgugcgguguugcucgaagggcuccacgagcaauucgcuuugcagcccgcacucacgcacgcccacaugc

SEQ ID NO: 4204827 - RNA, 55 nt, Molluscum contagiosum virus
gcucagcauggaguuuugcaacgcguagucguacagcagguccuccgugcugggc

SEQ ID NO: 4204828 - RNA, 62 nt, Molluscum contagiosum virus
gcugcacaugugcgugcaccucaagaagacgcagagcgagggcgacgcguacguguccaugc

SEQ ID NO: 4204829 - RNA, 56 nt, Molluscum contagiosum virus
gcugcacgggucguagucgugcgcgagugggaugcgcagggugcgcucguaguagc

SEQ ID NO: 4204830 - RNA, 57 nt, Molluscum contagiosum virus
gcugcgaguacuuccuggaaugguucgugcgcaaccacuucgagaugaucucgcggc

SEQ ID NO: 4204831 - RNA, 82 nt, Molluscum contagiosum virus
ggagccguacaugaucagcguuuaccccgagggccgcgucuucuuugacgcggacucgggcacaggcgugaucgcggacuuc

SEQ ID NO: 4204832 - RNA, 64 nt, Molluscum contagiosum virus
ggagcgagauggcguugaugcugcgcagcgucucagcgaugaggcgcggcgccgucuuguugcc

SEQ ID NO: 4204833 - RNA, 57 nt, Molluscum contagiosum virus
ggaguagcgugcgccugcagccuguuuuuaucgagccgcgcuucgagcacgcuuucc

SEQ ID NO: 4204834 - RNA, 56 nt, Molluscum contagiosum virus
ggcaacgcaugcagucgacggcgcuguuucgcgcgcacuccagcagcaguguugcc

SEQ ID NO: 4204835 - RNA, 59 nt, Molluscum contagiosum virus
ggcagcgcaagcgcaggcaguacgcggccacguacgcgcgcagcagugccagcgcuguc

SEQ ID NO: 4204836 - RNA, 87 nt, Molluscum contagiosum virus
ggcaggaggauuggaggacgugcacgggccagcgcuaacgcgaggccccggcccgugcugucugugcauguagcagucguucuugcc

SEQ ID NO: 4204837 - RNA, 74 nt, Molluscum contagiosum virus
ggcgcgcgcggucgacgggaacgaggucaucuucgugcugaagacgcuggccgugcccgccgacugccgccgcc

SEQ ID NO: 4204838 - RNA, 61 nt, Molluscum contagiosum virus
gggcagcguguagcggcacaccagcaggcacucgacucgcugcgugcgcagcccgcugccc

SEQ ID NO: 4204839 - RNA, 58 nt, Molluscum contagiosum virus
gggcuugucggaauuucugucugcgucccgagugacgcucgcguucucggcaaugccc

SEQ ID NO: 4204840 - RNA, 98 nt, Molluscum contagiosum virus
gggggcgcggcaggaggauuggaggacgugcacgggccagcgcuaacgcgaggccccggcccgugcugucugugcauguagcagucguucuugcccuc

SEQ ID NO: 4204841 - RNA, 122 nt, Molluscum contagiosum virus
gguccugcuucuugagcaugugagugguuaauggcucuuugggcgcgggcaugagaaagacgugcuccgcgggcgccauaaagagcagguuucccaguaccagcaacucucgcaguaguucc

SEQ ID NO: 4204842 - RNA, 60 nt, Molluscum contagiosum virus
gucugcuuuugcgucgcgcguuaccagcgcauugacaccgacgcgcgcgcaaacgcggac

SEQ ID NO: 4204843 - RNA, 124 nt, Molluscum contagiosum virus
gugggggcgccugcucaucccgcggcugcagaaccgcgcgcuguacagcuaccuguuccuguccaguuaccaccugugcgaccuguuccuggagcugcgcgagcugggcucggcgagcuuccgc

SEQ ID NO: 4204844 - RNA, 76 nt, Molluscum contagiosum virus
uacugcaacguggcgccgcugcuggaacaggugcgcaagcauuuccacuguacggagcgcgucuauccugucagua

SEQ ID NO: 4204845 - RNA, 66 nt, Molluscum contagiosum virus
ucacguagcgcucgcucgccgccgccacuuugucuuugaggauguaggcgagcauguucugcgcga

SEQ ID NO: 4204846 - RNA, 60 nt, Molluscum contagiosum virus
ucucgccagcgugcacgccgcgccgacucaggucgucggcgcgcagguccagcugcgaga

SEQ ID NO: 4204847 - RNA, 92 nt, Molluscum contagiosum virus
ucugaaggcuuggcuucucgacuggagggggcaacgccguucgugccguguccguuguuccagcuagaagaggccgucccggcgacuucaga

SEQ ID NO: 4204848 - RNA, 70 nt, Molluscum contagiosum virus
ugcucuuccccgagcucuucagcagcugcaccgaacgucagaaguucagcugcgcgggcuccgacgagca

SEQ ID NO: 4204849 - RNA, 55 nt, Molluscum contagiosum virus
ggucgagucguucucgcgguacuugaagaccagguccugcgagcucgacaugucc

SEQ ID NO: 4204850 - RNA, 57 nt, Molluscum contagiosum virus
ggucucuaccgccuugcugagcacgauggggcgcucggggaagagcagguggaugcc

SEQ ID NO: 4204851 - RNA, 85 nt, Molluscum contagiosum virus
ggugcggcgccuggaagcaagcgccgugaacugugcgacgcccagaggcgagcgccgugaacugugcagcgccaaggugaacgcc

SEQ ID NO: 4204852 - RNA, 59 nt, Molluscum contagiosum virus
ggugcucguacuccucaugaaugcgagcagcuggcucccuuggacggaaugcgagcgcc

SEQ ID NO: 4204853 - RNA, 124 nt, Molluscum contagiosum virus
gguucccccgcgagcggggcccugcgggacgcgucucaacgugggagucacagcccuggucgcaggcgaggacccccaucuugacacacgucccccgacgcagacacuugcgcgugacgagacc

SEQ ID NO: 4204854 - RNA, 70 nt, Molluscum contagiosum virus
guacagcggcuacugcaugcugugcuucguggagcagcggcuggacgacgugcagcaugccacgcuguac

SEQ ID NO: 4204855 - RNA, 88 nt, Molluscum contagiosum virus
gucgcgaaaggcgcuugauccugcgauggccgugaucgcgcgcgugagcuacagccucuacacgcagaacgagaucaacgccaacgac

SEQ ID NO: 4204856 - RNA, 78 nt, Molluscum contagiosum virus
gucggcgggcucggaaggugucgcgucugcguguuuugcgcugacggugcucccgacgccuucugagcccgagcugac

SEQ ID NO: 4204857 - RNA, 117 nt, Molluscum contagiosum virus
gucguguccgcggcgggcgcgggcgcggguccgugcacgggcucgagcgcgggcccgggcucgcgcucuuccguccgugcccggcuugugaacgcggcaugcgcgcggggccgcgac

SEQ ID NO: 4204858 - RNA, 102 nt, Molluscum contagiosum virus
gugcacguuuacguagcggcgcucgggcggguuguuggcguggcugugcaggcggauggcgcgcccgaugaucugcuugagcgacgccucguuccaugucau

SEQ ID NO: 4204859 - RNA, 102 nt, Molluscum contagiosum virus
gugccgcgagagcucacgcgcucacgcgacgcuggcacgcucacggugcacgcgcuuugcgugcccgagcacgcgugugugcgcgugaccgcuuucgugcac

SEQ ID NO: 4204860 - RNA, 108 nt, Molluscum contagiosum virus
gugcgcgcggcccgcguccgcagcucccugcgcguacgccgcaugguugagaaugugcuuggucauguggaugucgcaguagaugaacuucuugaugcccgcgcgugc

SEQ ID NO: 4204861 - RNA, 78 nt, Molluscum contagiosum virus
gugugcuuguugcuaggcguguccgcagcugugcgcgugcuugccgccgcacagcugcgggcugcggcuacgugccac

SEQ ID NO: 4204862 - RNA, 55 nt, Molluscum contagiosum virus
guugguguggaaaaagacggucuugcccgcgggcacgccgucgaugcgcaccagc

SEQ ID NO: 4204863 - RNA, 67 nt, Molluscum contagiosum virus
ucgacggcgccucgagcgcgcuggacuugcgcgagcgagugaaggucgcguuccaggugcugggcga

SEQ ID NO: 4204864 - RNA, 56 nt, Molluscum contagiosum virus
ucgcguggaacuugacgccguagcgccgcagcagcugcggcuugggcaccgcgcgg

SEQ ID NO: 4204865 - RNA, 69 nt, Molluscum contagiosum virus
ucgcgugugcggggcagcaggcacuaggcgccggggcgcgcgcgcuuguuuggugucgcgcacgcacgg

SEQ ID NO: 4204866 - RNA, 70 nt, Molluscum contagiosum virus
ugccagcagcauuuuggugggcacgcagaccacggcgcgccgccggugcgugcccagcagguagcuggca

SEQ ID NO: 4204867 - RNA, 56 nt, Molluscum contagiosum virus
ugcgcgcguggugugcuaccagcuccucgggcaugauggacauguacacgcgcgcg

SEQ ID NO: 4204868 - RNA, 58 nt, Molluscum contagiosum virus
ugcugcacgggucguagucgugcgcgagugggaugcgcagggugcgcucguaguagca

SEQ ID NO: 4204869 - RNA, 130 nt, Molluscum contagiosum virus
uguagcgguugaccagcuccacguugggguugucgggcgcuuuguaguugcgguggugcauccugcugaguaggaacauuucgagcggcugcgcgcgcgccgcgaacucggcgaacaggucuacuuccag

SEQ ID NO: 4204870 - RNA, 79 nt, Murray Valley encephalitis virus
gggcuucaucuccauuguuggcagggacuccucuuccgagacgguucugggaggcuuuccaaccguggagaaucagcuu

SEQ ID NO: 4204871 - RNA, 59 nt, Murray Valley encephalitis virus
cugcucguugcaagcacugcgcgaucucauugcucauuuuuacgcuugccacgaaccag

SEQ ID NO: 4204872 - RNA, 81 nt, Murray Valley encephalitis virus
agcugcuacagcuuggaugguguugcgagcaauggcuuuuccgucaaccucagcaauagccaugcccaugcuagcaaugcu

SEQ ID NO: 4204873 - RNA, 72 nt, Murray Valley encephalitis virus
gcuuuugcuaagcaugccgugucccugacguuccauccugagccaggggauauucgugcucuuccaaucagc

SEQ ID NO: 4204874 - RNA, 92 nt, Norwalk virus
ggugugccauccaauucaguaagguugauuacagugccauuggaggucccucuuaucuuggcaacaugugacaaugaaacugggguggugcc

SEQ ID NO: 4204875 - RNA, 58 nt, Poliovirus
ucucaccuccugggagucaacugcuuggagcaagucauugauacauucaggaggggga

SEQ ID NO: 4204876 - RNA, 65 nt, Poliovirus
cagcccugcuugguucgaggcacuaaagauggugcuugagaaaaucggauucggagacagaguug

SEQ ID NO: 4204877 - RNA, 78 nt, Poliovirus
ugaccggcaggcccuguaagcguggcagggugauguuucuuaauccauugaacucacagcacauaggggcuaugguca

SEQ ID NO: 4204878 - RNA, 69 nt, Poliovirus
aacuuuaagagaugcuguccuuuagugugugguaaggcaauucaauuaauggacaaaucuuccagaguu

SEQ ID NO: 4204879 - RNA, 65 nt, Respiratory syncytial virus
guuaacauauuuuuugauuuuaggcauguuagacuacaugccuugauuucacagggugugguuac

SEQ ID NO: 4204880 - RNA, 59 nt, Rubella virus
cguugcccuggcgcugacacgcgaccucgccaucgucagccugacccgggccuccgacg

SEQ ID NO: 4204881 - RNA, 57 nt, Rubella virus
uggcgagccagagggccgaggcuggggagcaagucgcgcgucccauggggcucacca

SEQ ID NO: 4204882 - RNA, 72 nt, Rubella virus
cuucccaggggggacggcgccgagguccucgccauugacggugagauggcaauugccucccccgggggcaag

SEQ ID NO: 4204883 - RNA, 58 nt, Rubella virus
gcgagccagcaguuaugcaccucccauacaccgauggcgacgugccacagcugaucgc

SEQ ID NO: 4204884 - RNA, 58 nt, Rubella virus
gcgcacgccuuuggggaccaugcgcauggccaugcacauggccacggugguguugugc

SEQ ID NO: 4204885 - RNA, 56 nt, Rubella virus
gcucgccgccuaccgccgcaucuacaucgaugaggcguucacucucggcggcgagu

SEQ ID NO: 4204886 - RNA, 64 nt, Rubella virus
ucgaggucgacuucacugaguucgacaugaaccagacccucgcuacucgggacgucgagcucga

SEQ ID NO: 4204887 - RNA, 76 nt, Rubella virus
cguugcgcaggcugcgcgcgccugcggcgccuacacgagugccgggugccccaagugcgccuacggccgcgcccug

SEQ ID NO: 4204888 - RNA, 74 nt, Rubella virus
gcccgcgagcgugaugcuguggcacagggcguucuugaacuugaacacgcgcucgcuguaguacgcgucggggc

SEQ ID NO: 4204889 - RNA, 85 nt, Rubella virus
gcggcgaaguccucaugagugcgggcuucgcucagggcgcggccguaggcgcacuuggggcacccggcacucguguaggcgccgc

SEQ ID NO: 4204890 - RNA, 57 nt, Rubella virus
ggugccgccaugauggccgucgugcccgaggaacggcagcugaugguggugguggcc

SEQ ID NO: 4204891 - RNA, 63 nt, SARS coronavirus
gugaugucaagaaaguuaaaagcauccaaugaugagugcccuuaacaauuuucuugaacuuac

SEQ ID NO: 4204892 - RNA, 56 nt, SARS coronavirus
guuuccaucauuaauaaugcuguuuacacaaagguagaugguauugauguggagau

SEQ ID NO: 4204893 - RNA, 64 nt, SARS coronavirus
uaccaguguguguacacaacaucuucacacaguuggugauugguuguccuccacuugcuaggua

SEQ ID NO: 4204894 - RNA, 69 nt, SARS coronavirus
augucugaggcaaaauguuggacugagacugaccuuacuaaaggaccucacgaauuuugcucacagcau

SEQ ID NO: 4204895 - RNA, 83 nt, SARS coronavirus
gaagaacaagcacucucaguagguuucuuggcaaugucagucauugugcagacaccuauuguagauacaugugcuggggcuuc

SEQ ID NO: 4204896 - RNA, 86 nt, SARS coronavirus
ucaugaugaccacacaaggcagaugggcuauguaaacguuuucgcaauuccguuuacgauacauagucuacucuugugcagaauga

SEQ ID NO: 4204897 - RNA, 92 nt, SARS coronavirus
gagcucauucauucugucuuucucuuaauggugaagcaaaguauuaaaaauacuagagcagcaacaaugagaaaaaguggcgaguagagcuc

SEQ ID NO: 4204898 - RNA, 56 nt, SARS coronavirus
gcagcuacugaaaagcauguagugcguuuaucuagcaauaaauugccagaagcugc

SEQ ID NO: 4204899 - RNA, 64 nt, Seoul virus
uaguaguagacuccgcaagaaacagcaguuaaauaacagcaggaucauguggaguuugcuauua

SEQ ID NO: 4204900 - RNA, 67 nt, Seoul virus
gucaguauuugcuuaucauuuuuugcuugcuauuugccaaaagaugaaauuaugugcaaucuuugac

SEQ ID NO: 4204901 - RNA, 59 nt, Sin Nombre virus
cguaggaagacaauguguuugauuacaggcuaaaucauaacaaauuacugucuuccuug

SEQ ID NO: 4204902 - RNA, 81 nt, Sin Nombre virus
gucuuuauuaagucaagaacacaaaaaagguaauauaaaucaagcuuauaagaucacauuugauguuguggcuguaaagac

SEQ ID NO: 4204903 - RNA, 81 nt, Sin Nombre virus
uuuugugcuaggcuuauaagcaaugcuuuuauuauauuauauaaauauacuucuaaggcacucuuaaacggccgcucaaag

SEQ ID NO: 4204904 - RNA, 60 nt, Tula virus
cagcaugugcaauuagacauucuguuauaucucuuaacaaaugccccauaugccaugcug

SEQ ID NO: 4204905 - RNA, 94 nt, Tula virus
uaguaguagaccgagaagacucaaacacagacaaaacauacuucuuuauuccaguuuucucuguguuugcuucuucuugcggagucuacuacua

SEQ ID NO: 4204906 - RNA, 85 nt, Tula virus
guuuuuugaaaggccauuuaagagugcacuugauguauaccuguauacuauuauaaaaacacuacuuguaagccuugcacaaaau

SEQ ID NO: 4204907 - RNA, 56 nt, Vaccinia virus
gcuuugaguuuuguugaaucgaugagugaaguaucaucgguugcaccuucagaugc

SEQ ID NO: 4204908 - RNA, 53 nt, Vaccinia virus
agagaaaacaaaacgaggauaguugauuuauuacuuagcuaccaucccacucu

SEQ ID NO: 4204909 - RNA, 79 nt, Vaccinia virus
ggcaaaucuuaucauuggucgguguuuggucuugcuuugugacuuugauaauaacaucgauucccauaugauguuuguu

SEQ ID NO: 4204910 - RNA, 62 nt, Vaccinia virus
uggaaaguguaaagacaacgaauacaaacgccauaauuuguguccgggaacauacgcuucca

SEQ ID NO: 4204911 - RNA, 73 nt, Vaccinia virus
uuuaugauauggguagaguuuuuguccccgcuccuuuuggaggaucgcaagaauuuauuucuaaaucuaugag

SEQ ID NO: 4204912 - RNA, 82 nt, Variola virus
cauauuuguaacuucgucguaaagcguuaaaucaauagaauaaaccauuuuguggugcaacuuuuuacgaacuaguuguaug

SEQ ID NO: 4204913 - RNA, 77 nt, West Nile virus
gauccuguguucuagcaccaccagccaccuaugucggcgcacugugccguguggcugguugugcagagcagaagauc

SEQ ID NO: 4204914 - RNA, 22 nt, Vaccinia virus
aaacaaaacgaggauaguugau

SEQ ID NO: 4204915 - RNA, 22 nt, Vaccinia virus
ugauauggguagaguuuuuguc
